(19) United States
(12) Patent Application Publication
(10) Pub. No.: US 2018/0349549 A1
(43) Pub. Date: Dec. 6, 2018

(54) Genetic resistance prediction against antimicrobial drugs in microorganism using structural changes in the genome

(71) Applicant: ARES GENETICS GMBH, Vienna (AT)

(72) Inventors: ANDREAS KELLER, Püttlingen (DE); SUSANNE SCHMOLKE, München (DE); CORD FRIEDRICH STÄHLER, Hirschberg an der Bergstraße (DE); CHRISTINA BACKES, Saarbrücken (DE); VALENTINA GALATA, Saarbrücken (DE)

(21) Appl. No.: 15/749,384

(22) PCT Filed: Aug. 5, 2016
(86) PCT No.: PCT/EP2016/068731

§ 371 Date: Jan. 31, 2018

(30) Foreign Application Priority Data
Aug. 6, 2015 (EP) 15180042.2

(51) Int. Cl. G06F 19/16; G06F 19/24; G06F 19/18; G06F 19/22

(52) U.S. Cl. CPC G06F 19/16; G06F 19/24; C12Q 1/04; G06F 19/22; C12Q 2600/156; G06F 19/18

(57) ABSTRACT

Genetic resistance prediction against antimicrobial drugs in microorganism using structural changes in the genome

The invention relates to a method of determining an infection of a patient with at least one microorganism, particularly a bacterial microorganism, potentially resistant to antimicrobial drug treatment, a method of selecting a treatment of a patient suffering from an infection with at least one microorganism, particularly bacterial microorganism, and a method of determining structural changes of the genome of the microorganism, particularly bacterial microorganism, comprising at least one gene, as well as computer program products used in these methods.

[0001] The present invention relates to a method of determining an infection of a patient with at least one microorganism, particularly a bacterial microorganism, potentially resistant to antimicrobial drug treatment, a method of selecting a treatment of a patient suffering from an infection with at least one microorganism, particularly bacterial microorganism, and a method of determining structural changes of the genome of the microorganism, particularly bacterial microorganism, comprising at least one gene, as well as computer program products used in these methods.

[0002] Antibiotic resistance is a form of drug resistance whereby a sub-population of a microorganism, e.g. a strain of a bacterial species, can survive and multiply despite exposure to an antibiotic drug. It is a serious health concern for the individual patient as well as a major public health issue. Timely treatment of a bacterial infection requires the analysis of clinical isolates obtained from patients with regard to antibiotic resistance, in order to select an efficacious therapy. Generally, for this purpose an association of the identified resistance with a certain microorganism (i.e. ID) is necessary.

[0003] Antibacterial drug resistance (ADR) represents a major health burden. According to the World Health Organization's antimicrobial resistance global report on surveillance, ADR leads to 25,000 deaths per year in Europe and 23,000 deaths per year in the US. In Europe, 2.5 million extra hospital days lead to societal cost of 1.5 billion euro. In the US, the direct cost of 2 million illnesses leads to 20 billion dollar direct cost. The overall cost is estimated to be substantially higher, reducing the gross domestic product (GDP) by up to 1.6%.

[0004] In general the mechanisms for resistance of bacteria against antimicrobial treatments rely to a very substantial part on the organism's genetics. The respective genes or molecular mechanisms are either encoded in the genome of the bacteria or on plasmids that can be interchanged between different bacteria. The most common resistance mechanisms include:

[0005] 1) Efflux pumps are high-affinity reverse transport systems located in the membrane that transports the antibiotic out of the cell, e.g. resistance to tetracycline.

[0006] 2) Specific enzymes modify the antibiotic in a way that it loses its activity. In the case of streptomycin, the antibiotic is chemically modified so that it will no longer bind to the ribosome to block protein synthesis.

[0007] 3) An enzyme is produced that degrades the antibiotic, thereby inactivating it. For example, the penicillinases are a group of beta-lactamase enzymes that cleave the beta lactam ring of the penicillin molecule.

[0008] In addition, some pathogens show natural resistance against drugs. For example, an organism can lack a transport system for an antibiotic or the target of the antibiotic molecule is not present in the organism.

[0009] Pathogens that are in principle susceptible to drugs can become resistant by modification of existing genetic material (e.g. spontaneous mutations for antibiotic resistance, happening in a frequency of one in about 100 mio bacteria in an infection) or the acquisition of new genetic material from another source. One example is horizontal gene transfer, a process where genetic material contained in small packets of DNA can be transferred between individual bacteria of the same species or even between different species. Horizontal gene transfer may happen by transduction, transformation or conjugation.

[0010] Generally, testing for susceptibility/resistance to antimicrobial agents is performed by culturing organisms in different concentrations of these agents.

[0011] In brief, agar plates are inoculated with patient sample (e.g. urine, sputum, blood, stool) overnight. On the next day individual colonies are used for identification of organisms, either by culturing or using mass spectroscopy. Based on the identity of organisms new plates containing increasing concentration of drugs used for the treatment of these organisms are inoculated and grown for additional 12-24 hours. The lowest drug concentration which inhibits growth (minimal inhibitory concentration—MIC) is used to determine susceptibility/resistance for tested drugs. The process takes at least 2 to 3 working days during which the patient is treated empirically. Automated systems exist from several companies, e.g. Biomeriux (Vitek), Beckman Coulter (Microscan). A significant reduction of time-to-result is needed especially in patients with life-threatening disease and to overcome the widespread misuse of antibiotics.

[0012] Recent developments include PCR based test kits for fast bacterial identification (e.g. Biomerieux Biofire Tests, Curetis Unyvero Tests). With these test the detection of selected resistance loci is possible for a very limited number of drugs, but no correlation to culture based AST is given. Mass spectroscopy is increasingly used for identification of pathogens in clinical samples (e.g. Bruker Biotyper), and research is ongoing to establish methods for the detection of susceptibility/resistance against antibiotics.

[0013] The use of molecular techniques for direct detection of MRSA has become more commonplace especially for screening purposes. Resistance to methicillin is mediated via the mec operon which is part of the staphylococcal cassette chromosome mec (SCCmec). Recently PCR tests were introduced that are based on the detection of the right extremity sequence of the SCCmec in combination with S. aureus specific marker. Initial reports exist that describe culture based susceptibility reports despite detection of the presence of a resistance conferring gene.

[0014] For some drugs such it is known that at least two targets are addressed, e.g. in case of Ciprofloxacin (drug bank ID 00537; http://www.drugbank.ca/drugs/DB00537) targets include DNA Topoisomerase IV, DNA Topoisomerase II and DNA Gyrase. It can be expected that this is also the case for other drugs although the respective secondary targets have not been identified yet. In case of a common regulation, both relevant genetic sites would naturally show a co-correlation or redundancy.

[0015] It is known that drug resistance can be associated with genetic polymorphisms. This holds for viruses, where resistance testing is established clinical practice (e.g. HIV genotyping). More recently, it has been shown that resistance has also genetic causes in bacteria and even higher organisms, such as humans where tumors resistance against certain cytostatic agents can be linked to genomic mutations.

[0016] Wozniak et al. (BMC Genomics 2012, 13(Suppl 7):S23) disclose genetic determinants of drug resistance in Staphylococcus aureus based on genotype and phenotype data. Stoesser et al. disclose prediction of antimicrobial susceptibilities for Escherichia coli and Klebsiella pneumoniae isolates using whole genomic sequence data (J Antimicrob Chemother 2013; 68: 2234-2244).

[0017] Chewapreecha et al (Chewapreecha et al (2014) Comprehensive Identification of single nucleotid polymorphisms associated with beta-lactam resistance within pneumococcal mosaic genes. PLoS Genet 10(8): e1004547) used a comparable approach to identify mutations in gram-positive Streptococcus Pneumonia.

[0018] In recent studies, genetic tests are taken into account that consider variations in the genome of a microorganism, e.g. a bacterial microorganism. In previous works it could be shown that a faster decision for a treatment could be made using changes in single bases. However, this does not necessarily apply to all antimicrobial drugs, e.g. antibiotics, tested.

[0019] The fast and accurate detection of infections with microorganisms, particularly microbial species, e.g. Staphylococcus aureus, and the prediction of response to anti-microbial therapy represent a high unmet clinical need.

[0020] This need is addressed by the present invention.

### SUMMARY OF THE INVENTION

[0021] The inventors found out that structural variations in the genome that relate to more than one base, particularly at least one gene or more genes in an open reading frame can be related to resistance/susceptibility of microorganisms, particularly bacterial microorganisms, to antimicrobial, e.g. antibiotic, drugs. For example, an efflux pump can be present on a plasmid additionally in a genome. Such efflux pump then can transport a medicine/drug like an antibiotic out of the organism, so that it cannot be effective. Thus, a bacterium having such efflux pump on a plasmid is resistant.

[0022] According to a first aspect, the present invention relates to a method of determining structural variations in a genome of a microorganism, particularly a bacterial microorganism, comprising at least a change in the genome comprising more than one base, comprising:

[0023] obtaining or providing a first data set of gene sequences of a plurality of clinical isolates of the microorganism, wherein optionally at least a part of the gene sequences of the first data set are assembled; and/or obtaining or providing a first data set of gene sequences of a plurality of clinical isolates of the microorganism and aligning the gene sequences of the first data set to at least one, preferably one, reference sequence;

[0024] analyzing the gene sequences of the first data set for structural variations of the genome comprising at least a change in the genome comprising more than one base to obtain a third data set of structural variants;

[0025] providing a second data set of antimicrobial drug, e.g. antibiotic, resistance and/or susceptibility of the plurality of clinical isolates of the microorganism;

[0026] correlating the third data set with the second data set and statistically analyzing the correlation; and

[0027] determining the structural variations in the genome of the microorganism associated with antimicrobial drug, e.g. antibiotic, resistance.

[0028] A second aspect of the present invention relates to a diagnostic method of determining an infection of a patient with a microorganism, particularly a bacterial microorganism potentially resistant to antimicrobial drug treatment, comprising the steps of:

[0029] a) obtaining or providing a sample containing or suspected of containing a microorganism, particularly a bacterial microorganism, from the patient;

[0030] b) determining the presence of at least one structural variation in at least one genetic sequence of the microorganism, particularly bacterial microorganism, as determined by the method of the first aspect, wherein the presence of said at least one structural variation is indicative of an infection with an antimicrobial drug resistant microorganism in said patient.

[0031] A third asped of the present invention relates to a method of selecting a treatment of a patient suffering from an infection with a potentially resistant microorganism, particularly bacterial microorganism, comprising the steps of:

[0032] a) obtaining or providing a sample containing or suspected of containing a microorganism, particularly a bacterial microorganism, from the patient;

[0033] b) determining the presence of at least one structural variation in at least one genetic sequence of the microorganism, particularly bacterial microorganism, as determined by the method of any one of claims 1 to 3, wherein the presence of said at least one structural variation is indicative of a resistance to one or more antimicrobial drugs;

[0034] c) identifying said at least one or more antimicrobial drugs; and

[0035] d) selecting one or more antimicrobial drugs different from the ones identified in step c) and being suitable for the treatment of the infection with the microorga

[0036] A fourth aspect of the present invention relates to a method of determining structural variations of a genome of a microorganism for a clinical isolate of the microorganism, particularly a bacterial microorganism, comprising: obtaining or providing at least one gene sequence of the clinical isolate of the microorganism, particularly the bacterial microorganism; and determining the presence of structural variations in the at least one gene sequence of the clinical isolate of the microorganism, particularly bacterial microorganism, as determined by the method of the first aspect.

[0037] In a fifth aspect the present invention relates to one or more computer program products comprising computer executable instructions which, when executed, perform a method according to any one of the first to the fourth aspect of the present invention.

[0038] Further aspects and embodiments of the invention are disclosed in the dependent claims and can be taken from the following description, figures and examples, without being limited thereto.

### FIGURES

[0039] The enclosed drawings should illustrate embodiments of the present invention and convey a further understanding thereof. In connection with the description they serve as explanation of concepts and principles of the invention. Other embodiments and many of the stated advantages can be derived in relation to the drawings. The elements of the drawings are not necessarily to scale towards each other. Identical, functionally equivalent and acting equal features and components are denoted in the figures of the drawings with the same reference numbers, unless noted otherwise.

[0040] FIG. 1 shows schematically a read-out concept for a diagnostic test according to a method of the present invention.

### DETAILED DESCRIPTION OF THE PRESENT INVENTION

[0041] Definitions

[0042] Unless defined otherwise, technical and scientific terms used herein have the same meaning as commonly understood by one of ordinary skill in the art to which this invention belongs.

[0043] An “antimicrobial drug” in the present invention refers to a group of drugs that includes antibiotics, antifungals, antiprotozoals, and antivirals. According to certain embodiments, the antimicrobial drug is an antibiotic.

[0044] The term “nucleic acid molecule” refers to a polynucleotide molecule having a defined sequence. It comprises DNA molecules, RNA molecules, nucleotide analog molecules and combinations and derivatives thereof, such as DNA molecules or RNA molecules with incorporated nucleotide analogs or cDNA.

[0045] The term “nucleic acid sequence information” relates to an information which can be derived from the sequence of a nucleic acid molecule, such as the sequence itself or a variation in the sequence as compared to a reference sequence.

[0046] The term “mutation” relates to a variation in the sequence as compared to a reference sequence. Such a reference sequence can be a sequence determined in a predominant wild type organism or a reference organism, e.g. a defined and known bacterial strain or substrain. A mutation is for example a deletion of one or multiple nucleotides, an insertion of one or multiple nucleotides, or substitution of one or multiple nucleotides, duplication of one or a sequence of multiple nucleotides, translocation of one or a sequence of multiple nucleotides, e.g. also a single nucleotide polymorphism (SNP).

[0047] In the context of the present invention a “sample” is a sample which comprises at least one nucleic acid molecule from a bacterial microorganism. Examples for samples are: cells, tissue, body fluids, biopsy specimens, blood, urine, saliva, sputum, plasma, serum, cell culture supernatant, swab sample and others. According to certain embodiments, the sample is a patient sample (clinical isolate).

[0048] New and highly efficient methods of sequencing nucleic acids referred to as next generation sequencing have opened the possibility of large scale genomic analysis. The term “next generation sequencing” or “high throughput sequencing” refers to high-throughput sequencing technologies that parallelize the sequencing process, producing thousands or millions of sequences at once. Examples include Massively Parallel Signature Sequencing (MPSS), Polony sequencing, 454 pyrosequencing, Illumina (Solexa) sequencing, SOLiD sequencing, Ion semiconductor sequencing, DNA nanoball sequencing, Helioscope(™) single molecule sequencing, Single Molecule SMRT(™) sequencing, Single Molecule real time (RNAP) sequencing, Nanopore DNA sequencing, Sequencing By Hybridization, Amplicon Sequencing, GnuBio.

[0049] Within the present description the term “microorganism” comprises the term microbe. The type of microorganism is not particularly restricted, unless noted otherwise or obvious, and, for example, comprises bacteria, viruses, fungi, microscopic algae and protozoa, as well as combinations thereof. According to certain aspects, it refers to one or more bacterial species, being either Gram-negative or Gram-positive, particularly one or more of Acinetobacter, Escherichia, e.g. E.coli, Enterobacter, Klebsiella, Proteus, Pseudomonas, Salmonella, Serratia, Shigella and/or Staphylococcus species.

[0050] A reference to a microorganism or microorganisms in the present description comprises a reference to one microorganism as well a plurality of microorganisms, e.g. two, three, four, five, six or more microorganisms.

[0051] A vertebrate within the present invention refers to animals having a vertebrae, which includes mammals—including humans, birds, reptiles, amphibians and fishes. The present invention thus is not only suitable for human medicine, but also for veterinary medicine.

[0052] According to certain embodiments, the patient in the present methods is a vertebrate, more preferably a mammal and most preferred a human patient.

[0053] Before the invention is described in exemplary detail, it is to be understood that this invention is not limited to the particular component parts of the process steps of the methods described herein as such methods may vary. It is also to be understood that the terminology used herein is for purposes of describing particular embodiments only, and is not intended to be limiting. It must be noted that, as used in the specification and the appended claims, the singular forms “a,” “an” and “the” include singular and/or plural referents unless the context clearly dictates otherwise. For example, the term “a” as used herein can be understood as one single entity or in the meaning of “one or more” entities. It is also to be understood that plural forms include singular and/or plural referents unless the context clearly dictates otherwise. It is moreover to be understood that, in case parameter ranges are given which are delimited by numeric values, the ranges are deemed to include these limitation values.

[0054] Regarding the dosage of the antimicrobial, e.g. antibiotic, drugs, it is referred to the established principles of pharmacology in human and veterinary medicine. For example, Forth, Henschler, Rummel “Allgemeine and spezielle Pharmakologie and Toxikologie”, 9th edition, 2005 might be used as a guideline. Regarding the formulation of a ready-to-use medicament, reference is made to “Remington, The Science and Practice of Pharmacy”, 22^{nd} edition, 2013.

[0055] Assembling of a gene sequence can be carried out by any known method and is not particularly limited.

[0056] According to certain embodiments, mutations that were found using alignments can also be compared or matched with alignment-free methods, e.g. for detecting single base exchanges, for example based on contigs that were found by assemblies. For example, reads obtained from sequencing can be assembled to contigs and the contigs can be compared to each other.

[0057] A structural variation comprising a change in the genome comprising more than one base refers to a structural variation wherein at least two bases in a gene sequence of a genome of a microorganism that are adjacent are changed, and can refer to e.g. a deletion of multiple (2 or more) nucleotides, an insertion of multiple (2 or more) nucleotides, a substitution of multiple (2 or more) nucleotides, a duplication of a sequence of multiple (2 or more) nucleotides, or a translocation of a sequence of multiple (2 or more) nucleotide. According to certain embodiments, a structural variation can comprise bigger parts sections of the genome, e.g. at least one whole gene in the genome of the microorganism, or even more genes in an open reading frame.

[0058] In the present invention, not specific changes of single nucleotides are determined, but a determination is based on bigger parts of the genome, as above.

[0059] In the present invention, a reference sequence is not particularly limited, as long as it is useful as a reference for one or more unknown gene sequences in one or more samples, It can for example be one or more reference genomes, a pan genome or one or more centroids. According to certain embodiments, the reference sequences comprise one or more centroids, wherein a centroid is a representative of a gene group/family/cluster of a genome, e.g. of a microorganism. Centroids can be for example extracted from the database MetaRef (http://metaref.org/), which was used in the present examples, with the extraction from the data base being carried out particularly on Nov. 24, 2014. After the extraction the data from the MetaRef database can be updated continually for further experiments. A list of centroids can be extracted for each organism separately or as a whole. In the present examples a list of centroids was extracted for each organism. The centroid information, e.g. for annotation, can be extracted from databases like IMG (http://img.jgi.doe.gov/), as in the present case, or NCBI.

[0060] According to a first aspect, the present invention relates to a method of determining structural variations in a genome of a microorganism, particularly a bacterial microorganism, comprising at least a change in the genome comprising more than one base, comprising:

[0061] obtaining or providing a first data set of gene sequences of a plurality of clinical isolates of the microorganism, wherein optionally at least a part of the gene sequences of the first data set are assembled; and/or obtaining or providing a first data set of gene sequences of a plurality of clinical isolates of the microorganism and aligning the gene sequences of the first data set to at least one, preferably one, reference sequence;

[0062] analyzing the gene sequences of the first data set for structural variations of the genome comprising at least a change in the genome comprising more than one base to obtain a third data set of structural variants;

[0063] providing a second data set of antimicrobial drug, e.g. antibiotic, resistance and/or susceptibility of the plurality of clinical isolates of the microorganism;

[0064] correlating the third data set with the second data set and statistically analyzing the correlation; and

[0065] determining the structural variations in the genome of the microorganism associated with antimicrobial drug, e.g. antibiotic, resistance.

[0066] In this method, as well as the other methods of the invention, the first data set of gene sequences of a plurality of clinical isolates can be provided or obtained in any way, preferably non-invasive, and can be e.g. provided from in vitro samples.

[0067] According to certain embodiments, the obtaining or providing of gene sequences of a plurality of clinical isolates in this method—as well as the other methods of the invention—can comprise the following:

[0068] A sample of a vertebrate, e.g. a human, e.g. is provided or obtained and nucleic acid sequences, e.g. DNA or RNA sequences, are recorded by a known method for recording nucleic acid, which is not particularly limited. For example, nucleic acid can be recorded by a sequencing method, wherein any sequencing method is appropriate, particularly sequencing methods wherein a multitude of sample components, as e.g. in a blood sample, can be analyzed for nucleic acids and/or nucleic acid fragments and/or parts thereof contained therein in a short period of time, including the nucleic acids and/or nucleic acid fragments and/or parts thereof of at least one microorganism of interest, particularly a bacterial microorganism. For example, sequencing can be carried out using polymerase chain reaction (PCR), particularly multiplex PCR, or high throughput sequencing or next generation sequencing, preferably using high-throughput sequencing. For sequencing, preferably an in vitro sample is used.

[0069] The data obtained by the sequencing can be in any format, and can then be used to identify the nucleic acids of the microorganism to be identified, by known methods, e.g. fingerprinting methods, comparing genomes and/or aligning to at least one, or more, reference sequences of one or more species of the microorganism of interest, e.g. a reference genome and/or centroids, etc., forming a third data set of, optionally aligned, genes for a microorganism-discarding additional data from other sources, e.g. the vertebrate. For the present method, also the raw data can be used and/or assemblies, at least in part, can be used for forming the third data set. Thus, according to certain embodiments, at least a part of the gene sequences of the first data set can be assembled, wherein assembly can be carried out by any known method and is not particularly limited. In addition, also data from reference sequences, e.g. centroids and/or genomes of known species, e.g. from bacterial species that are already known, e.g. from databases like MetaRef and/or at the NCBI, can be used in the first data set and/or for evaluation of the first data set.

[0070] For some organisms, it might be useful in genome-wide association studies to reference the points of interest, e.g. structural variations, to one constant reference for enhanced standardization. In case of the human with a high consistency of the genome and 99% identical sequences among individuals this is easy and represents the standard, as corresponding reference genomes are available in databases.

[0071] In case of organisms that trigger infectious diseases (e.g. bacteria and viruses) this is much more difficult, though, and particularly also genetic variations that are not on genes, particularly known genes, can be missed when aligning sequence data to a reference genome. One possibility to overcome this is to fall back on a virtual pan-genome which contains all sequences of a certain genus or to perform reference free variation calling. A further possibility is the analysis of a huge amount of reference sequences, e.g. from MetaRef, and even all available references, which is much more complex. Therein all n references from a database (e.g. RefSeq) are extracted and compared with the newly sequenced bacterial genomes k. After this, matrices (% of mapped reads, % of covered genome) can be applied and the data can be compared to several reference sequences. In such a case, n×k complete alignments are carried out. Having a big number of references, stable results can be obtained.

[0072] In the present method, gene sequence of the first data set can also be assembled, at least in part, according to certain embodiments with known methods, e.g. by de-novo assembly or mapping assembly. The sequence assembly is not particularly limited, and any known genome assembler can be used, e.g. based on Sanger, 454, Solexa, Illumina, SOLid technologies, etc., as well as hybrids/mixtures thereof.

[0073] According to certain embodiments, the data of nucleic acids of different origin than the microorganism of interest, e.g. a bacterial microorganism, can be removed after the nucleic acids of interest are identified, e.g. by filtering the data out. Such data can e.g. include nucleic acids of a patient, e.g. the vertebrate, e.g. human, and/or other microorganisms, etc. This can be done by e.g. computational subtraction, as developed by Meyerson et al. 2002. For this, also aligning to the genome of the vertebrate, etc., is possible. For aligning, several alignment-tools are available. This way the original data amount from the sample can be drastically reduced.

[0074] After such removal of “excess” data, obtaining the third data set can be carried out for the microorganism, e.g. a bacterial microorganism, as described above.

[0075] Using these techniques, structural variations in the genome, e.g. in the gene sequences, of the microorganism of interest, e.g. a bacterial microorganism, can be obtained for various species.

[0076] When testing these same species for antimicrobial drug, e.g. antibiotic, susceptibility of a number of antimicrobial drugs, e.g. antibiotics, e.g. using standard culturing methods on dishes with antimicrobial drug, e.g. antibiotic, intake, as e.g. described below, the results of these antimicrobial drug, e.g. antibiotic, susceptibility tests can then be cross-referenced/correlated with the structural variations in the genome of the respective microorganism. Using several, e.g. 50 or more than 50, 100 or more than 100, 200 or more than 200, 400 or more than 400, 800 or more than 800, or 900 or more than 900 different isolates of the same or different species of a microorganism, statistical analysis can be carried out on the obtained cross-referenced data between genetic variations and antimicrobial drug, e.g. antibiotic, susceptibility for these microorganisms, using known methods.

[0077] Regarding culturing methods, samples of microorganisms can be e.g. cultured overnight. On the next day individual colonies can be used for identification of organisms, either by culturing or using mass spectroscopy. Based on the identity of organisms new plates containing increasing concentration of antibiotics used for the treatment of these organisms are inoculated and grown for additional 12-24 hours. The lowest drug concentration which inhibits growth (minimal inhibitory concentration—MIC) can be used to determine susceptibility/resistance for tested antibiotics.

[0078] Also, resistance testing can be carried out by determining e.g. known resistance genes in the different isolates, like in case of methicillin resistant Staphylococcus aureus (MRSA) and methicillin susceptible Staphylococcus aureus (MSSA). For determining resistances, respectively susceptibility, the data from culturing methods and/or from determining known resistance genes, as well as data obtained in different ways, e.g. based on mass spectrometry (possibly also in connection with culturing) can be used.

[0079] Correlation of the genetic variations with antimicrobial drug, e.g. antibiotic, resistance can be carried out in a usual way and is not particularly limited. For example, resistances can be correlated to structural variances in the whole genome of the respective microorganism or only parts thereof, for example only coding parts of the genome. In some cases even only genetic variations in genes, e.g. certain genes, or certain mutations in genes can be determined. After correlation, statistical analysis can be carried out.

[0080] According to certain embodiments, the data of the first data set can be filtered prior to a possible annotation to a pan-genome and/or reference genome(s) and the correlation with the resistance/susceptibility data.

[0081] For example, to reduce the number of similar annotations they can be filtered and aggregated by one or more of the following:
[0082] Only annotations for which the considered structural variation lies on a protein can be kept and the further data discarded
[0083] Only annotations which do not contain “hypothetical proteins” can be kept
[0084] Annotations can be sorted by identification number (ID) and gene product
[0085] For a unique pair of IDs and gene products only the first annotation can be kept, e.g in case of multiple genes in a genome

[0086] Also, according to certain embodiments, the following structural variations can be excluded:

[0087] 1. Constant features and phenotypes (same value or only NA) can be removed (e.g. centroids present in all samples or phenotypes with the result “resistant” for all samples)

[0088] 2. Almost constant features and phenotypes can also removed, e.g. features whose most frequent value was in >=95% of all samples, ignoring NA values, can be removed (e.g. a centroid is present in >=95% of all samples)

[0089] Also phenotypes whose most frequent value was in >=90% of all samples, ignoring NA values, can be removed (e.g. >=90% of all samples are resistant)

[0090] 3. In addition, as is the case in the present examples for the Gram-positive bacteria S. aureus (Gram neg. bacteria in the Examples did not have partially missing data for phenotypes), only drugs with non-missing data for at least 10% of the samples can be kept.

[0091] For statistical analysis, as in the examples, e.g. Fisher's exact two-sided test can be applied with subsequent p-value adjustment over all phenotypes together using FDR and p-value threshold of 0.01 (1e-2). Additionally, 10 permutation tests can be performed by permuting each phenotype separately and applying Fisher's exact test to the centroid presence matrix and permuted phenotypes. The results then can be further filtered by centroid annotation, i.e.

[0092] 1. Centroids without a gene product name can be removed

[0093] 2. Centroids whose gene product name contains “putative”, “predicted” or “hypothetical” can be removed

[0094] 3. If there are centroids with same gene product name and gene symbol than only the first one can be kept

[0095] 4. Centroids without GeneBank accession can be removed

[0096] According to certain embodiments, the structural variations can be annotated to a pan-genome of the microorganism and/or annotated to one or more reference sequences, e.g. centroids, of the microorganism. The construction of a pan-genome is not particularly limited and can be done using known methods.

[0097] However, other suitable reference genomes (e.g. used in the Examples, but also for other microorganisms) can be found at publicly available data bases like at the NCBI or from MetaRef.

[0098] Statistical analysis of the correlation of the gene mutations with antimicrobial drug, e.g. antibiotic, resistance is not particularly limited and can be carried out, depending on e.g. the amount of data, in different ways, for example using analysis of variance (ANOVA), Student's t-test or Fisher's exact test, for example with a sample size n of 50, 100, 200, 300, 400, 500 or 600, and a level of significance (a-error-level) of e.g. 0.05 or smaller, e.g. 0.05, preferably 0.01 or smaller. A statistical value can be obtained for each structural variation and/or each genetic sequence in the genome as well as for all antibiotics tested, a group of antibiotics or a single antibiotic. The obtained p-values can also be adapted for statistical errors, if needed.

[0099] For statistically sound results a multitude of individuals should be sampled, with n=50, 100, 200, 300, 400, 500 or 600, and a level of significance (a-error-level) of e.g. 0.05 or smaller, e.g. 0.05, preferably 0.01 or smaller. According to certain embodiments, particularly significant results can be obtained for n=200, 300, 400, 500 or 600.

[0100] For statistically sound results a multitude of individuals should be sampled, with n=50 or more, 100 or more, 200 or more, 300 or more, 400 or more, 500 or more or 600 or more, and a level of significance (a-error-level) of e.g. 0.05 or smaller, e.g. 0.05, preferably 0.01 or smaller. According to certain embodiments, particularly significant results can be obtained for n=200 or more, 300 or more, 400 or more, 500 or more or 600 or more.

[0101] After the above procedure has been carried out for the individual strains of bacterial species in the Examples, the data disclosed in Tables 1 to 24 were obtained for the statistically best correlations between structural variations and antimicrobial drug, e.g. antibiotic, resistances. In the tables, tables with an odd number, e.g. 1, 3, 5, represent the top 50 results for the statistical analysis as described above, i.e. the structural variations with the best p-value (denoted best_pv in the tables) for at least one antibiotic, whereas the tables with an even number show the top 50 results regarding p-value with at least one drug class ratio of 1.0, so that the structural variation applies to a multitude of drugs and at least a specific drug class, wherein the following applies:

[0102] Drug class ratio=number of significant drugs of that class/number of tested drugs of that class For example, if two fluoroquinolones were tested but only one has significant p-value, then the drug class ratio for fluoroquinolones is 0.5.

[0103] Genetic variations in the gene sequences given in Tables 1 to 24, with regard to the several reference sequences as above, were proven as valid markers for antimicrobial drug, e.g. antibiotic, resistance. According to certain embodiments, structural variations in at least the gene sequences and/or relating to at least the whole sequences between the start coordinate (denoted “Start.Coord” in the tables) and the end coordinate (denoted “End.Coord” in the tables) of the genes, particularly relating to the whole sequence between the start coordinate and the end coordinate, given for consecutive numbers (“No.”) 1 to 50 with the highest p-values, as above, in Tables 1-24 are obtained by the present method.

[0104] When referring to the second data set, wherein the second data set e.g. comprises, respectively is, a set of antimicrobial drug, e.g. antibiotic, resistances of a plurality of clinical isolates, this can, within the scope of the invention, also refer to a self-learning data base that, whenever a new sample is analyzed, can take this sample into the second data set and thus expand its data base. The second data set thus does not have to be static and can be expanded, either by external input or by incorporating new data due to self-learning. This is, however, not restricted to the first aspect of the invention, but applies to other aspects of the invention that refer to a second data set, which does not necessarily have to refer to antimicrobial drug resistance. The same applies, where applicable, to the first data set, e.g. in the first aspect.

[0105] According to certain embodiments of the first aspect, the structural variations are detected alignment-free. According to certain embodiments, the structural variations are annotated to a pan-genome of the microorganism and/or annotated to one or more reference sequences.

[0106] According to certain embodiments, statistical analysis in the present methods is carried can be carried using Fisher's test with p<10⁻³, preferably p<10⁻⁶, further preferably p<10⁻⁹.

[0107] The method of the first aspect of the present invention, as well as related methods, e.g. according to the 2^{nd}, 3^{rd} and 4^{th} aspect, can, according to certain embodiments, comprise correlating different genetic sites to each other. This way even higher statistical significance can be achieved.

[0108] According to certain embodiments of the method of the first aspect and related methods-as above, the second data set can be provided by culturing the clinical isolates of the microorganism on agar plates provided with antimicrobial drugs, e.g. antibiotics, at different concentrations, and the second data can be obtained by taking the minimal concentration of the plates that inhibits growth of the respective microorganism.

[0109] According to certain embodiments of the method of the first aspect and related methods, the microorganism is a Gram positive bacterial microorganism, particularly a Staphylococcus species, particularly Staphylococcus aureus, and the antimicrobial drug, e.g. antibiotic drug, is selected from the group consisting of β-lactams, β-lactam inhibitors, quinolines and derivatives thereof, e.g. fluoroquinolones, aminoglycosides, glycopeptides, lincosamides, macrolides, nitrofuranes, oxazolidinones polyketides, respectively tetracyclines, and folate synthesis inhibitors, e.g. benzene derived/sulfonamide antibiotics, preferably from the group consisting of Amoxicillin/Clavulanate, Ampicillin, Ampicillin/Sulbactam, Azithromycin, Cefalothin, Cefazolin, Cefepime, Cefotaxime, Cefoxitin, Ceftriaxone, Cefuroxime, Chloramphenicol, Ciprofloxacin, Clindamycin, Daptomycin, Ertapenem, Erythromycin, Fosfomycin, Fusidic acid, Gentamicin, Imipenem, Levofloxacin, Linezolid, Meropenem, Methicillin, Moxifloxacin, Mupirocin, Nitrofurantoin, Norfloxacin, Ofloxacin, Oxacillin, Penicillin G, Piperacillin/Tazobactam, Quinupristin/Dalfopristin, Rifampicin, Teicoplanin, Tetracycline, Tigecycline, Tobramycin, Trimethoprim/Sulfamethoxazole, and Vancomycin, further preferably from the group consisting of Amoxicillin/Clavulanate, Ampicillin, Ampicillin/Sulbactam, Azithromycin, Cefalothin, Cefazolin, Cefepime, Cefotaxime, Cefoxitin, Ceftriaxone, Cefuroxime, Chloramphenicol, Ciprofloxacin, Clindamycin, Daptomycin, Ertapenem, Erythromycin, Fosfomycin, Fusidic acid, Gentamicin, Imipenem, Levofloxacin, Linezolid, Meropenem, Moxifloxacin, Mupirocin, Nitrofurantoin, Norfloxacin, Ofloxacin, Oxacillin, Penicillin G, Piperacillin/Tazobactam, Quinupristin/Dalfopristin, Rifampicin, Teicoplanin, Tetracycline, Tigecycline, Tobramycin, Trimethoprim/Sulfamethoxazole, and Vancomycin.

[0110] According to certain embodiments of the method of the first aspect and related methods, the microorganism is a Gram negative bacterial microorganism, particularly one or more of Acinetobacter, Escherichia, e.g. E.coli, Enterobacter, Klebsiella, Proteus, Pseudomonas, Salmonella, Serratia, and/or Shigella species, particularly as denoted in the Examples, and the antimicrobial drug, e.g. antibiotic, is at least one selected from the group of β-lactams, β-lactam inhibitors, quinolines and derivatives thereof, aminoglycosides, polyketides, respectively tetracyclines, and folate synthesis inhibitors, preferably from the group consisting of Amoxicillin/K Clavulanate (AUG), Ampicillin (AM), Aztreonam (AZT), Cefazolin (CFZ), Cefepime (CPM), Cefotaxime (CFT), Ceftazidime (CAZ), Ceftriaxone (CAX), Cefuroxime (CRM), Cephalotin (CF), Ciprofloxacin (CP), Ertapenem (ETP), Gentamicin (GM), Imipenem (IMP), Levofloxacin (LVX), Meropenem (MER), Piperacillin/Tazobactam (P/T), Ampicillin/Sulbactam (A/S), Tetracycline (TE), Tobramycin (TO), and Trimethoprim/Sulfamethoxazole (T/S).

[0111] According to certain embodiments, structural variations in at least the gene sequences and/or relating to at least the whole sequences between the start coordinate (denoted “Start.Coord” in the tables) and the end coordinate (denoted “End.Coord” in the tables) of the genes, particularly relating to the whole sequence between the start coordinate and the end coordinate, given for consecutive numbers (“No.”) 1 to 50 with the highest p-values, as above, in Tables 1-24 are obtained by the present method, and the antibiotic is at least one chosen from the class of antibiotics in the column designated “sign_phenos_class”, particularly the one in the column designated “best_pheno_class”, preferably wherein the antibiotic is at least one chosen from the ones in the column designated “sign_phenos”, particularly the one in the column designated “best_pheno”.

[0112] A second aspect of the present invention relates to a diagnostic method of determining an infection of a patient with a microorganism, particularly a bacterial microorganism potentially resistant to antimicrobial drug treatment, comprising the steps of:

[0113] a) obtaining or providing a sample containing or suspected of containing a microorganism, particularly a bacterial microorganism, from the patient;

[0114] b) determining the presence of at least one structural variation in at least one genetic sequence of the microorganism, particularly bacterial microorganism, as determined by the method of the first aspect, wherein the presence of said at least one structural variation is indicative of an infection with an antimicrobial drug resistant microorganism in said patient.

[0115] With this method, any mutations in the genome of a microorganism, e.g. the bacterial species given above and below in the Examples, e.g. a clinical isolate with an unknown strain of the microorganism, particularly bacterial microorganism, correlated with antimicrobial drug, e.g. antibiotic, resistance can be determined and a thorough antimicrobial drug, e.g. antibiotic, resistance profile can be established which can add information to a profile which considers only changes in single bases, e.g. single nucleotide polymorphisms (SNPs).

[0116] Again, the different steps can herein be carried out as described with regard to the first aspect of the present invention.

[0117] According to this aspect, an infection with a microorganism, particularly a bacterial microorganism, in a patient can be determined using sequencing methods, as well as a resistance to antimicrobial drugs, e.g. antibiotics, of the microorganism can be determined in a short amount of time compared to conventional methods.

[0118] A third asped of the present invention relates to a method of selecting a treatment of a patient suffering from an infection with a potentially resistant microorganism, particularly bacterial microorganism, comprising the steps of:

[0119] a) obtaining or providing a sample containing or suspected of containing a microorganism, particularly a bacterial microorganism, from the patient;

[0120] b) determining the presence of at least one structural variation in at least one genetic sequence of the microorganism, particularly bacterial microorganism, as determined by the method of any one of claims 1 to 3, wherein the presence of said at least one structural variation is indicative of a resistance to one or more antimicrobial drugs;

[0121] c) identifying said at least one or more antimicrobial drugs; and

[0122] d) selecting one or more antimicrobial drugs different from the ones identified in step c) and being suitable for the treatment of the infection with the microorganism, particularly the bacterial microorganism.

[0123] This method can be carried out similarly to the second aspect of the invention and enables a fast was to select a suitable treatment with antibiotics for any infection with an unknown microorganism, particularly bacterial microorganism, e.g. Staphylococcus aureus.

[0124] In this method, as well as similar ones, no aligning is necessary, as the unknown sample can be directly correlated, after the genome or genome sequences are produced, with the second data set, and thus genetic variations and antimicrobial drug, e.g. antibiotic, resistances can be determined. The first data set can be assembled, for example, using known techniques.

[0125] According to certain embodiments, statistical analysis in the present method is carried out using Fisher's test with p<10⁻³, preferably p<10⁻⁶, preferably p<10⁻⁹. Also, according to certain embodiments, the method further comprises correlating different genetic sites to each other.

[0126] A fourth aspect of the present invention relates to a method of determining structural variations of a genome of a microorganism for a clinical isolate of the microorganism, particularly a bacterial microorganism, comprising: obtaining or providing at least one gene sequence of the clinical isolate of the microorganism, particularly the bacterial microorganism; and determining the presence of structural variations in the at least one gene sequence of the clinical isolate of the microorganism, particularly bacterial microorganism, as determined by the method of the first aspect.

[0127] With this method, antimicrobial drug, e.g. antibiotic, resistances in an unknown isolate of a microorganism, e.g. Staphylococcus aureus, can be determined.

[0128] A simple read out concept for a diagnostic test as described in this aspect is shown schematically in FIG. 1.

[0129] According to FIG. 1, a sample 1, e.g. blood from a patient, is used for molecular testing 2, e.g. using next generation sequencing (NGS), and then a molecular fingerprint 3 is taken, e.g. in case of NGS a sequence of selected genomic/plasmid regions or the whole genome is assembled. This is then compared to a reference library 4 containing several reference sequences and/or a pan-genome, i.e. selected sequences or the whole sequence are/is compared to one or more reference sequences and/or a pan-genome, and structural variations (,sequence/gene additions/deletions, etc.) are correlated with susceptibility/resistance profiles of reference sequences the reference library. The reference library 4 herein contains many genomes and/or a pan-genome and is different from a reference genome. Then the result 5 is reported which can comprise ID (pathogen identification), i.e. a list of all (pathogenic) species identified in the sample, and AST (antimicrobial susceptibility testing), i.e. a list including a susceptibility/resistance profile for all species listed, based on structural variations.

[0130] According to certain embodiments, statistical analysis in the present method is carried out using Fisher's test with p<10⁻³, preferably p<10⁻⁶, preferably p<10⁻⁹. Also, according to certain embodiments, the method further comprises correlating different genetic sites to each other.

[0131] Again, in the third and fourth aspect, the different steps can herein be carried out as described with regard to the first aspect of the present invention.

[0132] In a fifth aspect the present invention relates to one or more computer program products comprising computer executable instructions which, when executed, perform a method according to any one of the first to the fourth aspect of the present invention.

[0133] In certain embodiments the computer program product is one on which program commands or program codes of a computer program for executing said method are stored. According to certain embodiments the computer program product is a storage medium. As noted above, the computer program products of the present invention can be self-learning, e.g. with respect to the first and second data sets.

[0134] In order to obtain the best possible information from the highly complex genetic data and develop an optimum model for diagnostic and therapeutical uses as well as the methods of the present invention—which can be applied stably in clinical routine—a thorough in silico analysis can be necessary. The proposed principle is based on a combination of different approaches, e.g. assembly of the gene sequences and/or genome of the microorganisms, at least in part and optionally annotating the sequences to one or more reference sequences and/or a pan-genome, and/or alignment of the sequence data of the clinical isolate to be determined with one or more reference sequences and/or a pan-genome, and correlation of structural variations found in every sample, e.g. from each patient, respectively an unknown clinical isolate, with all references and drugs, e.g. antibiotics, or only one or some of them, and search for structural variations which occur in one or several drug and one or several strains.

[0135] Using the above steps a list of structural variations s with regard to one or more reference sequences and/or a pan-genome is generated. These can be stored in databases and statistical models can be derived from the databases. The statistical models can be based on at least one or more structural variations in at least one or more sequences. Statistical models that can be trained can be combined from structural variations and sequences. Examples of algorithms that can produce such models are association Rules, Support Vector Machines, Decision Trees, Decision Forests, Discriminant-Analysis, Cluster-Methods, and many more.

[0136] The goal of the training is to allow a reproducible, standardized application during routine procedures.

[0137] For this, for example, gene sequences or parts thereof can be sequenced from a patient to be diagnosed. Afterwards, core characteristics can be derived from the sequence data which can be used to predict resistance. These are the points in the database used for the final model, i.e. at least one structural variation, but also combinations of structural variations, etc.

[0138] The corresponding characteristics can be used as input for the statistical model and thus enable a prognosis for new patients. Not only the information regarding all resistances of all microorganisms, against all or only some or one drugs, e.g. antibiotics, can be integrated in a computer decision support tool, but also corresponding directives (e.g. EUCAST) so that only treatment proposals are made that are in line with the directives.

[0139] An eighth aspect of the present invention relates to the use of the computer program product according to the fifth aspect, e.g. for determining structural variations of a genome of a microorganism for a clinical isolate of the microorganism in the fourth aspect of the invention and/or for use in the diagnostic method of the second method of the invention and/or for selecting a treatment in the third aspect of the present invention and/or in the method of the first aspect of the present invention.

[0140] A sixth aspect of the present invention discloses a diagnostic method of determining an infection of a patient with a microorganism, preferably a bacterial microorganism, particularly one as noted above (i.e. one or more of Acinetobacter, Escherichia, e.g. E.coli, Enterobacter, Klebsiella, Proteus, Pseudomonas, Salmonella, Serratia, Shigella and/or Staphylococcus species), potentially resistant to antimicrobial drug, e.g. antibiotic, treatment, comprising the steps of:

[0141] a) obtaining or providing a sample containing or suspected of containing at least one microorganism, preferably a bacterial microorganism, particularly one as noted above (i.e. one or more of Acinetobacter, Escherichia, e.g. E.coli, Enterobacter, Klebsiella, Proteus, Pseudomonas, Salmonella, Serratia, Shigella and/or Staphylococcus species), from the patient;

[0142] b) determining the presence of at least one structural variation in at least two sequences from the group of sequences annotated with Nos. 1-50 with regard to the reference sequences, particularly centroids (denoted “Scaffold.External.Accession”), with the sequences names, particularly centroid names (denoted “Scaffold.Name”), given in Tables 1 to 24, particularly with the reference genomes and genome names given in Tables 1 a to 24 a, wherein the presence of said at least two structural variations is indicative of an infection with an antimicrobial drug, e.g. antibiotic, resistant microorganism, preferably bacterial microorganism, particularly one as noted above (i.e. one or more of Acinetobacter, Escherichia, e.g. E.coli, Enterobacter, Klebsiella, Proteus, Pseudomonas, Salmonella, Serratia, Shigella and/or Staphylococcus species), in said patient.

[0143] As noted above, genetic variations in the gene sequences given in Tables 1 to 24, with regard to the several reference sequences as above, were proven as valid markers for antimicrobial drug, e.g. antibiotic, resistance. According to certain embodiments, structural variations in at least the gene sequences and/or relating to at least the whole sequences between the start coordinate (denoted “Start.Coord” in the tables) and the end coordinate (denoted “End.Coord” in the tables) of the genes, particularly relating to the whole sequence between the start coordinate and the end coordinate, given for consecutive numbers (“No.”) 1 to 50 with the highest p-values, as above, in Tables 1-24 are obtained by the present method.

[0144] According to certain embodiments, structural variations in at least the gene sequences and/or relating to at least the whole sequences between the start coordinate (denoted “Start.Coord” in the tables) and the end coordinate (denoted “End.Coord” in the tables) of the genes, particularly relating to the whole sequence between the start coordinate and the end coordinate, given for consecutive numbers (“No.”) 1 to 50 with the highest p-values, as above, in Tables 1-24 are obtained by the present method, and the antibiotic is at least one chosen from the class of antibiotics in the column designated “sign_phenos_class”, particularly the one in the column designated “best_pheno_class”, preferably wherein the antibiotic is at least one chosen from the ones in the column designated “sign_phenos”, particularly the one in the column designated “best_pheno”.

[0145] An infection of a patient with a microorganism, preferably a bacterial microorganism, particularly one as noted above (i.e. one or more of Acinetobacter, Escherichia, e.g. E.coli, Enterobacter, Klebsiella, Proteus, Pseudomonas, Salmonella, Serratia, Shigella and/or Staphylococcus species), potentially resistant to antimicrobial drug treatment herein means an infection of a patient with a microorganism, preferably a bacterial microorganism, particularly one as noted above (i.e. one or more of Acinetobacter, Escherichia, e.g. E.coli, Enterobacter, Klebsiella, Proteus, Pseudomonas, Salmonella, Serratia, Shigella and/or Staphylococcus species), wherein it is unclear if the microorganism, preferably bacterial microorganism, particularly one as noted above (i.e. one or more of Acinetobacter, Escherichia, e.g. E.coli, Enterobacter, Klebsiella, Proteus, Pseudomonas, Salmonella, Serratia, Shigella and/or Staphylococcus species), is susceptible to treatment with a specific antimicrobial drug or if it is resistant to the antimicrobial drug.

[0146] In step b) above, as well as corresponding steps, at least one structural variation in at least two positions is determined, so that in total at least two structural variations are determined, wherein the two structural variations are in different positions, respectively are different sequences.

[0147] In this method, as well as the other methods of the invention, the sample can be provided or obtained in any way, preferably non-invasive, and can be e.g. provided as an in vitro sample or prepared as in vitro sample.

[0148] According to certain aspects, structural variations in at least two, three, four, five, six, seven, eight, nine or ten positions, respectively sequences, are determined in any of the methods of the present invention, e.g. in at least two positions, respectively sequences, or in at least three positions, respectively sequences. Instead of testing only single positions, respectively sequences, a combination of several variant positions, respectively sequences, can improve the prediction accuracy and further reduce false positive findings that are influenced by other factors. Therefore, it is in particular preferred to determine the presence of structural variations in 2, 3, 4, 5, 6, 7, 8 or 9 (or more) sequences selected from the respective Table 1-24.

[0149] According to certain embodiments, the obtaining or providing a sample containing or suspected of containing at least one microorganism, preferably a bacterial microorganism, particularly one as noted above (i.e. one or more of Acinetobacter, Escherichia, e.g. E.coli, Enterobacter, Klebsiella, Proteus, Pseudomonas, Salmonella, Serratia, Shigella and/or Staphylococcus species), from the patient in this method—as well as the other methods of the invention—can comprise the following:

[0150] A sample of a vertebrate, e.g. a human, e.g. is provided or obtained and nucleic acid sequences, e.g. DNA or RNA sequences, are recorded by a known method for recording nucleic acid, which is not particularly limited. For example, nucleic acid can be recorded by a sequencing method, wherein any sequencing method is appropriate, particularly sequencing methods wherein a multitude of sample components, as e.g. in a blood sample, can be analyzed for nucleic acids and/or nucleic acid fragments and/or parts thereof contained therein in a short period of time, including the nucleic acids and/or nucleic acid fragments and/or parts thereof of the microorganism. For example, sequencing can be carried out using polymerase chain reaction (PCR), particularly multiplex PCR, or high throughput sequencing or next generation sequencing, preferably using high-throughput sequencing. For sequencing, preferably an in vitro sample is used.

[0151] The data obtained by the sequencing can be in any format, and can then be analyzed as described with regard to the first to fourth aspect of the present invention.

[0152] In a seventh aspect, the present invention relates to a method of selecting a treatment of a patient suffering from an infection with a potentially resistant microorganism, preferably a bacterial microorganism, particularly one as noted above (i.e. one or more of Acinetobacter, Escherichia, e.g. E.coli, Enterobacter, Klebsiella, Proteus, Pseudomonas, Salmonella, Serratia, Shigella and/or Staphylococcus species), comprising the steps of:

[0153] a) obtaining or providing a sample containing or suspected of containing at least one microorganism, preferably a bacterial microorganism, particularly one as noted above (i.e. one or more of Acinetobacter, Escherichia, e.g. E.coli, Enterobacter, Klebsiella, Proteus, Pseudomonas, Salmonella, Serratia, Shigella and/or Staphylococcus species), from the patient;

[0154] b) determining the presence of at least one structural variation in at least two sequences from the group of sequences annotated with Nos. 1-50 with regard to the reference sequences, particularly centroids (denoted “Scaffold.External.Accession”), with the sequences names, particularly centroid names (denoted “Scaffold.Name”), given in Tables 1 to 24, particularly with the reference genomes and genome names given in Tables 1 a to 24 a, wherein the presence of said at least two structural variations is indicative of a resistance to one or more antimicrobial, e.g. antibiotic, drugs;

[0155] c) identifying said at least one or more antimicrobial, e.g. antibiotic, drugs; and

[0156] d) selecting one or more antimicrobial, e.g. antibiotic, drugs different from the ones identified in step c) and being suitable for the treatment of the infection with the microorganism, preferably bacterial microorganism, particularly one as noted above (i.e. one or more of Acinetobacter, Escherichia, e.g. E.coli, Enterobacter, Klebsiella, Proteus, Pseudomonas, Salmonella, Serratia, Shigella and/or Staphylococcus species).

[0157] In this method, the steps a) of obtaining or providing a sample and b) of determining the presence of at least one structural variation are as in the method of the sixth aspect.

[0158] The identification of the at least one or more antimicrobial, e.g. antibiotic, drug in step c) is then based on the results obtained in step b) and corresponds to the antimicrobial, e.g. antibiotic, drug(s) that correlate(s) with the structural variations. Once these antimicrobial drugs, e.g. antibiotics, are ruled out, the remaining antimicrobial drugs, e.g. antibiotic drugs/antibiotics, can be selected in step d) as being suitable for treatment.

[0159] In the description, references to the sixth and seventh aspect also apply to the 9^{th}, 10^{th}, 11^{th} and 12^{th} aspect, referring to the same positions, respectively sequences, unless clear from the context that they don't apply.

[0160] According to certain embodiments, the microorganism is a Gram positive bacterial microorganism, particularly a Staphylococcus species, particularly Staphylococcus aureus, and the antimicrobial drug, e.g. antibiotic drug, is selected from the group consisting of β-lactams, β-lactam inhibitors, quinolines and derivatives thereof, e.g. fluoroquinolones, aminoglycosides, glycopeptides, lincosamides, macrolides, nitrofuranes, oxazolidinones polyketides, respectively tetracyclines, and folate synthesis inhibitors, e.g. benzene derived/sulfonamide antibiotics, preferably from the group consisting of Amoxicillin/Clavulanate, Ampicillin, Ampicillin/Sulbactam, Azithromycin, Cefalothin, Cefazolin, Cefepime, Cefotaxime, Cefoxitin, Ceftriaxone, Cefuroxime, Chloramphenicol, Ciprofloxacin, Clindamycin, Daptomycin, Ertapenem, Erythromycin, Fosfomycin, Fusidic acid, Gentamicin, Imipenem, Levofloxacin, Linezolid, Meropenem, Methicillin, Moxifloxacin, Mupirocin, Nitrofurantoin, Norfloxacin, Ofloxacin, Oxacillin, Penicillin G, Piperacillin/Tazobactam, Quinupristin/Dalfopristin, Rifampicin, Teicoplanin, Tetracycline, Tigecycline, Tobramycin, Trimethoprim/Sulfamethoxazole, and Vancomycin, further preferably from the group consisting of Amoxicillin/Clavulanate, Ampicillin, Ampicillin/Sulbactam, Azithromycin, Cefalothin, Cefazolin, Cefepime, Cefotaxime, Cefoxitin, Ceftriaxone, Cefuroxime, Chloramphenicol, Ciprofloxacin, Clindamycin, Daptomycin, Ertapenem, Erythromycin, Fosfomycin, Fusidic acid, Gentamicin, Imipenem, Levofloxacin, Linezolid, Meropenem, Moxifloxacin, Mupirocin, Nitrofurantoin, Norfloxacin, Ofloxacin, Oxacillin, Penicillin G, Piperacillin/Tazobactam, Quinupristin/Dalfopristin, Rifampicin, Teicoplanin, Tetracycline, Tigecycline, Tobramycin, Trimethoprim/Sulfamethoxazole, and Vancomycin.

[0161] According to certain embodiments, the microorganism is a Gram negative bacterial microorganism, particularly one or more of Acinetobacter, Escherichia, e.g. E.coli, Enterobacter, Klebsiella, Proteus, Pseudomonas, Salmonella, Serratia, and/or Shigella species, particularly as denoted in the Examples, and the antimicrobial drug, e.g. antibiotic, is at least one selected from the group of β-lactams, β-lactam inhibitors, quinolines and derivatives thereof, aminoglycosides, polyketides, respectively tetracyclines, and folate synthesis inhibitors, preferably from the group consisting of Amoxicillin/K Clavulanate (AUG), Ampicillin (AM), Aztreonam (AZT), Cefazolin (CFZ), Cefepime (CPM), Cefotaxime (CFT), Ceftazidime (CAZ), Ceftriaxone (CAX), Cefuroxime (CRM), Cephalotin (CF), Ciprofloxacin (CP), Ertapenem (ETP), Gentamicin (GM), Imipenem (IMP), Levofloxacin (LVX), Meropenem (MER), Piperacillin/Tazobactam (P/T), Ampicillin/Sulbactam (A/S), Tetracycline (TE), Tobramycin (TO), and Trimethoprim/Sulfamethoxazole (T/S).

[0162] In the methods of the invention the resistance of the microorganism, preferably bacterial microorganism, particularly one as noted above (i.e. one or more of Acinetobacter, Escherichia, e.g. E.coli, Enterobacter, Klebsiella, Proteus, Pseudomonas, Salmonella, Serratia, Shigella and/or Staphylococcus species), to one or more antimicrobial, e.g. antibiotic, drugs can be determined according to certain embodiments.

[0163] According to certain embodiments of the sixth and/or seventh aspect of the invention, the resistance of the microorganism, preferably bacterial microorganism, particularly one as noted above (i.e. one or more of Acinetobacter, Escherichia, e.g. E.coli, Enterobacter, Klebsiella, Proteus, Pseudomonas, Salmonella, Serratia, Shigella and/or Staphylococcus species), against 1, 2, 3, 4, 5, 6, 7, 8, 9, 10, 11, 12, 13, 14, 15 or 16, 17, 18, 19, 20 or more antibiotic drugs is determined.

[0164] According to certain embodiments of the sixth and/or seventh aspect of the invention, determining the nucleic acid sequence information with the sequences having a structural variation or the presence of a structural variation comprises using a next generation sequencing or high throughput sequencing method. According to preferred embodiments of the sixth and/or seventh aspect of the invention, a partial or entire genome sequence of a microorganism, preferably a bacterial microorganism, particularly one as noted above (i.e. one or more of Acinetobacter, Escherichia, e.g. E.coli, Enterobacter, Klebsiella, Proteus, Pseudomonas, Salmonella, Serratia, Shigella and/or Staphylococcus species), is determined by using a next generation sequencing or high throughput sequencing method.

[0165] A ninth aspect of the present invention is directed to a method of treating a patient suffering from an antimicrobial drug, e.g. antibiotic, resistant infection with a microorganism, preferably a bacterial microorganism, particularly one as noted above (i.e. one or more of Acinetobacter, Escherichia, e.g. E.coli, Enterobacter, Klebsiella, Proteus, Pseudomonas, Salmonella, Serratia, Shigella and/or Staphylococcus species), comprising the steps of:

[0166] a) obtaining or providing a sample containing or suspected of containing at least one microorganism, preferably a bacterial microorganism, particularly one as noted above (i.e. one or more of Acinetobacter, Escherichia, e.g. E.coli, Enterobacter, Klebsiella, Proteus, Pseudomonas, Salmonella, Serratia, Shigella and/or Staphylococcus species), from the patient;

[0167] b) determining the presence of at least one structural variation in at least two sequences from the group of sequences annotated with Nos. 1-50 with regard to the reference sequences, particularly centroids (denoted “Scaffold.External.Accession”), with the sequences names, particularly centroid names (denoted “Scaffold.Name”), given in Tables 1 to 24, particularly with the reference genomes and genome names given in Tables 1 to24 a, wherein the presence of said at least two structural variations is indicative of a resistance to one or more antimicrobial, e.g. antibiotic, drugs;

[0168] c) identifying said at least one or more antimicrobial, e.g. antibiotic, drugs;

[0169] d) selecting one or more antimicrobial, e.g. antibiotic, drugs different from the ones identified in step c) and being suitable for the treatment of the infection with the microorganism, preferably a bacterial microorganism, particularly one as noted above (i.e. one or more of Acinetobacter, Escherichia, e.g. E.coli, Enterobacter, Klebsiella, Proteus, Pseudomonas, Salmonella, Serratia, Shigella and/or Staphylococcus species); and

[0170] e) treating the patient with said one or more antimicrobial, e.g. antibiotic, drugs.

[0171] Herein, steps a) to d) can be carried out as described with respect to the seventh aspect. Step e) can be sufficiently carried out without being restricted and can be done e.g. non-invasively.

[0172] A tenth aspect of the present invention discloses a diagnostic method of determining an infection of a patient with a microorganism, preferably a bacterial microorganism, particularly one as noted above (i.e. one or more of Acinetobacter, Escherichia, e.g. E.coli, Enterobacter, Klebsiella, Proteus, Pseudomonas, Salmonella, Serratia, Shigella and/or Staphylococcus species), potentially resistant to antimicrobial drug, e.g. antibiotic, treatment, comprising the steps of:

[0173] a) obtaining or providing a sample containing or suspected of containing at least one microorganism, preferably a bacterial microorganism, particularly one as noted above (i.e. one or more of Acinetobacter, Escherichia, e.g. E.coli, Enterobacter, Klebsiella, Proteus, Pseudomonas, Salmonella, Serratia, Shigella and/or Staphylococcus species), from the patient;

[0174] b) determining the presence of at least one structural variation in at least one sequence from the group of sequences annotated with Nos. 1-50 with regard to the reference sequences, particularly centroids (denoted “Scaffold.External.Accession”), with the sequences names, particularly centroid names (denoted “Scaffold.Name”), given in Tables 1 to 24, particularly with the reference genomes and genome names given in Tables 1 to24 a, wherein the presence of said at least one structural variation is indicative of an infection with an antimicrobial drug, e.g. antibiotic, resistant microorganism, preferably a bacterial microorganism, particularly one as noted above (i.e. one or more of Acinetobacter, Escherichia, e.g. E.coli, Enterobacter, Klebsiella, Proteus, Pseudomonas, Salmonella, Serratia, Shigella and/or Staphylococcus species), in said patient.

[0175] In an eleventh aspect, the present invention relates to a method of selecting a treatment of a patient suffering from an infection with a potentially resistant microorganism, preferably a bacterial microorganism, particularly one as noted above (i.e. one or more of Acinetobacter, Escherichia, e.g. E.coli, Enterobacter, Klebsiella, Proteus, Pseudomonas, Salmonella, Serratia, Shigella and/or Staphylococcus species), comprising the steps of:

[0176] a) obtaining or providing a sample containing or suspected of containing at least one microorganism, preferably a bacterial microorganism, particularly one as noted above (i.e. one or more of Acinetobacter, Escherichia, e.g. E.coli, Enterobacter, Klebsiella, Proteus, Pseudomonas, Salmonella, Serratia, Shigella and/or Staphylococcus species), from the patient;

[0177] b) determining the presence of at least one structural variation in at least one sequence from the group of sequences annotated with Nos. 1-50 with regard to the reference sequences, particularly centroids (denoted “Scaffold.External.Accession”), with the sequences names, particularly centroid names (denoted “Scaffold.Name”), given in Tables 1 to 24, particularly with the reference genomes and genome names given in Tables 1 to24 a, wherein the presence of said at least one structural variation is indicative of a resistance to one or more antimicrobial, e.g. antibiotic, drugs;

[0178] c) identifying said at least one or more antimicrobial, e.g. antibiotic, drugs; and

[0179] d) selecting one or more antimicrobial, e.g. antibiotic, drugs different from the ones identified in step c) and being suitable for the treatment of the infection with the microorganism, preferably a bacterial microorganism, particularly one as noted above (i.e. one or more of Acinetobacter, Escherichia, e.g. E.coli, Enterobacter, Klebsiella, Proteus, Pseudomonas, Salmonella, Serratia, Shigella and/or Staphylococcus species).

[0180] Again, in the tenth and the eleventh aspect the steps correspond to those in the sixth or seventh aspect, although only a mutation in at least one gene is determined.

[0181] A twelfth aspect of the present invention is directed to a method of treating a patient suffering from an antimicrobial drug, e.g. antibiotic, resistant infection with a microorganism, preferably a bacterial microorganism, particularly one as noted above (i.e. one or more of Acinetobacter, Escherichia, e.g. E.coli, Enterobacter, Klebsiella, Proteus, Pseudomonas, Salmonella, Serratia, Shigella and/or Staphylococcus species), comprising the steps of:

[0182] a) obtaining or providing a sample containing or suspected of containing at least one microorganism, preferably a bacterial microorganism, particularly one as noted above (i.e. one or more of Acinetobacter, Escherichia, e.g. E.coli, Enterobacter, Klebsiella, Proteus, Pseudomonas, Salmonella, Serratia, Shigella and/or Staphylococcus species), from the patient;

[0183] b) determining the presence of at least one structural variation in at least one sequence from the group of sequences annotated with Nos. 1-50 with regard to the reference sequences, particularly centroids (denoted “Scaffold.External.Accession”), with the sequences names, particularly centroid names (denoted “Scaffold.Name”), given in Tables 1 to 24, particularly with the reference genomes and genome names given in Tables 1 to24 a, wherein the presence of said at least one structural variation is indicative of a resistance to one or more antimicrobial, e.g. antibiotic, drugs;

[0184] c) identifying said at least one or more antimicrobial, e.g. antibiotic, drugs;

[0185] d) selecting one or more antimicrobial, e.g. antibiotic, drugs different from the ones identified in step c) and being suitable for the treatment of the infection with the microorganism, preferably a bacterial microorganism, particularly one as noted above (i.e. one or more of Acinetobacter, Escherichia, e.g. E.coli, Enterobacter, Klebsiella, Proteus, Pseudomonas, Salmonella, Serratia, Shigella and/or Staphylococcus species); and e) treating the patient with said one or more antimicrobial, e.g. antibiotic, drugs.

[0186] Also in the twelfth aspect of the invention, steps a) to d) are analogous to the steps in the method of the ninth aspect of the present invention. Step e) can again be sufficiently carried out without being restricted and can be done e.g. non-invasively.

### EXAMPLES

[0187] The present invention will now be described in detail with reference to several examples thereof. However, these examples are illustrative and do not limit the scope of the invention.

### Example 1

### Acinetobacter, Particularly Acinetobacter Baumanii

[0188] Whole genome sequencing was carried out in addition to classical antimicrobial susceptibility testing of the same isolates for a cohort of 448 specimens. This allowed performing genome wide correlation studies to find genetic variants (e.g. point mutations, small insertions and deletion, larger structural variants, plasmid copy number gains, gene dosage effects) in the genome and plasmids that are significantly correlated to the resistance against one or several drugs. The approach also allows for comparing the relevant sites in the genome to each other.

[0189] In the approach the different sources of genetic resistance regarding structural variances as well as the different ways of how bacteria can become resistant were covered. By measuring clinical isolates collected in a broad geographical area and across a broad time span of three decades a complete picture going far beyond the rather artificial step of laboratory generated resistance mechanisms was tried to be generated.

[0190] To this end, a set of 21 clinically relevant antimicrobial agents with 5 different modes of action was put together, and the minimally inhibitory concentration (MIC) of the 21 drugs for the Acinetobacter isolates was measured.

[0191] The detailed procedure is given in the following:

[0192] Bacterial Strains

[0193] The inventors selected 448 Acinetobacter strains from the microbiology strain collection at Siemens Healthcare Diagnostics (West Sacramento, Calif.) for susceptibility testing and whole genome sequencing.

[0194] Antimicrobial Susceptibility Testing (AST) Panels Frozen reference AST panels were prepared following Clinical Laboratory Standards Institute (CLSI) recommendations. The following antimicrobial agents (with μg/ml concentrations shown in parentheses) were included in the panels:

[0195] Amoxicillin/K Clavulanate (0.5/0.25-64/32), Ampicillin (0.25-128), Ampicillin/Sulbactam (0.5/0.25-64/32), Aztreonam (0.25-64), Cefazolin (0.5-32), Cefepime (0.25-64), Cefotaxime (0.25-128), Ceftazidime (0.25-64), Ceftriaxone (0.25-128), Cefuroxime (1-64), Cephalothin (1-64), Ciprofloxacin (0.015-8), Ertepenem (0.12-32), Gentamicin (0.12-32), Imipenem (0.25-32), Levofloxacin (0.25-16), Meropenem (0.12-32), Piperacillin/Tazobactam (0.25/4-256/4), Tetracycline (0.5-64), Tobramycin (0.12-32), and Trimethoprim/Sulfamethoxazole (0.25/4.7-32/608). Prior to use with clinical isolates, AST panels were tested with QC strains. AST panels were considered acceptable for testing with clinical isolates when the QC results met QC ranges described by CLSI16.

[0196] Inoculum Preparation

[0197] Isolates were cultured on trypticase soy agar with 5% sheep blood (BBL, Cockeysville, Md.) and incubated in ambient air at 35±1° C. for 18-24 h. Isolated colonies (4-5 large colonies or 5-10 small colonies) were transferred to a 3 ml Sterile Inoculum Water (Siemens) and emulsified to a final turbidity of a 0.5 McFarland standard. 2 ml of this suspension was added to 25 ml Inoculum Water with Pluronic-F (Siemens). Using the Inoculator (Siemens) specific for frozen AST panels, 5 μl of the cell suspension was transferred to each well of the AST panel. The inoculated AST panels were incubated in ambient air at 35±1° C. for 16-20 h. Panel results were read visually, and minimal inhibitory concentrations (MIC) were determined.

[0198] DNA Extraction

[0199] Four streaks of each Gram-negative bacterial isolate cultured on trypticase soy agar containing 5% sheep blood and cell suspensions were made in sterile 1.5 ml collection tubes containing 50 μl Nuclease-Free Water (AM9930, Life Technologies). Bacterial isolate samples were stored at −20° C. until nucleic acid extraction. The Tissue Preparation System (TPS) (096D0382-02_01_B, Siemens) and the VERSANT® Tissue Preparation Reagents (TPR) kit (10632404B, Siemens) were used to extract DNA from these bacterial isolates. Prior to extraction, the bacterial isolates were thawed at room temperature and were pelleted at 2000 G for 5 seconds. The DNA extraction protocol DNAext was used for complete total nucleic acid extraction of 48 isolate samples and eluates, 50 μl each, in 4 hours. The total nucleic acid eluates were then transferred into 96-Well qPCR Detection Plates (401341, Agilent Technologies) for RNase A digestion, DNA quantitation, and plate DNA concentration standardization processes. RNase A (AM2271, Life Technologies) which was diluted in nuclease-free water following manufacturer's instructions was added to 50 μl of the total nucleic acid eluate for a final working concentration of 20 μg/ml. Digestion enzyme and eluate mixture were incubated at 37° C. for 30 minutes using Siemens VERSANT® Amplification and Detection instrument. DNA from the RNase digested eluate was quantitated using the Quant-iT™ PicoGreen dsDNA Assay (P11496, Life Technologies) following the assay kit instruction, and fluorescence was determined on the Siemens VERSANT® Amplification and Detection instrument. Data analysis was performed using Microsoft® Excel 2007. 25 μl of the quantitated DNA eluates were transferred into a new 96-Well PCR plate for plate DNA concentration standardization prior to library preparation. Elution buffer from the TPR kit was used to adjust DNA concentration. The standardized DNA eluate plate was then stored at −80° C. until library preparation.

[0200] Next Generation Sequencing

[0201] Prior to library preparation, quality control of isolated bacterial DNA was conducted using a Qubit 2.0 Fluorometer (Qubit dsDNA BR Assay Kit, Life Technologies) and an Agilent 2200 TapeStation (Genomic DNA ScreenTape, Agilent Technologies). NGS libraries were prepared in 96 well format using NexteraXT DNA Sample Preparation Kit and NexteraXT Index Kit for 96 Indexes (Illumina) according to the manufacturer's protocol. The resulting sequencing libraries were quantified in a qPCR-based approach using the KAPA SYBR FAST qPCR MasterMix Kit (Peqlab) on a ViiA 7 real time PCR system (Life Technologies). 96 samples were pooled per lane for paired-end sequencing (2×100bp) on Illumina Hiseq2000 or Hiseq2500 sequencers using TruSeq PE Cluster v3 and TruSeq SBS v3 sequncing chemistry (Illumina). Basic sequencing quality parameters were determined using the FastQC quality control tool for high throughput sequence data (Babraham Bioinformatics Institute).

[0202] Data Analysis

[0203] For each organism in the examples, a list of centroids was extracted from MetaRef (http://metaref.org/). Herein, centroids were representatives of genes, etc. in a group/family/cluster. Data for information/annotation regarding the centroids was extracted from the database IMG (http://img.jgi.doe.gov/).

[0204] For Acinetobacter, 1380 centroids of A. baumannii were used as reference sequences, extracted from MetaRef.

[0205] The centroid presence in samples was evaluated as follows: Sequences of centroids were aligned against the de novo assemblies using BLASTn (http://blast.ncbi.nlm.nih.gov/Blast.cgi).

[0206] The following parameters were used:
[0207] BLAST db type: “fasta” and “nucl”
[0208] word size: 11 (default)
[0209] gapopen: 3 (default 5)
[0210] gapextend: 2 (default)
[0211] penalty: −2 (default −3)
[0212] reward: 1 (default)

[0213] A centroids was considered as present if the alignment result contained at least one hit with
[0214] min. 80% identity of assembly sequence and centroid sequence
[0215] min. 80% of centroid sequence was aligned, computed as

$$centroidcoverage = \frac{centoidalignmentend - centroidalignmentstart + 1}{centroidlength}$$

[0216] In the results, a centroid was coded as 0/1 (absent/present)

[0217] Association testing and result filtering:

[0218] The input data was further filtered as follows to reduce the amount of data:
[0219] 1. Constant features and phenotypes (same value or only NA) were removed (e.g. centroids present in all samples or phenotypes with “resistant” for all samples)
[0220] 2. Almost constant features and phenotypes were removed:
   [0221] Features whose most frequent value was in >=95% of all samples, ignoring NA values (e.g. a centroid is present in >=95% of all samples), were removed
   [0222] Penotypes whose most frequent value was in >=90% of all samples, ignoring NA values (e.g. >=95% of all samples are resistant), were removed 3. Particularly for S. aureus in Example 12, only drugs with non-missing data for at least 10% of the samples were kept

[0223] For statistical analysis, Fisher's exact two-sided test was applied with subsequent p-value adjustment over all phenotypes together using FDR and p-value threshold of 0.01 (1e-2). Additionally, 10 permutation tests were performed by permuting each phenotype separately and applying Fisher's exact test to the centroid presence matrix and permuted phenotypes. The results were further filtered by centroid annotation, i.e.
[0224] 1. Centroids without a gene product name were removed
[0225] 2. Centroids whose gene product name contains “putative”, “predicted” or “hypothetical” were removed
[0226] 3. If there are centroids with same gene product name and gene symbol than only the first one was kept
[0227] 4. Centroids without GeneBank accession were removed

[0228] After the above procedure has been carried out, the data disclosed in Tables 1 and 2 were obtained for the statistically best correlations between structural variations and antimicrobial drug, e.g. antibiotic, resistances. Table 1 (as well as the odd Tables 3, 5, 7, 9, 11, 13, 15, 17, 19, 21 and 23 in Examples 2 to 12) represents the top 50 results for structural variations with the best p-value (denoted best_pv in the tables) for at least one antibiotic, whereas Table 2 (as well as the even Tables 4, 6, 8, 10, 12, 14, 16, 18, 20, 22 and 24 in Examples 2 to 12) shows the top 50 results regarding p-value with at least one drug class ratio of 1.0, so that the structural variation applies to a multitude of drugs and at least a specific drug class, wherein the following applies:

[0229] Drug class ratio=number of significant drugs of that class/number of tested drugs of that class

[0230] For example, if two fluoroquinolones were tested but only one has significant p-value, then the drug class ratio for fluoroquinolones is 0.5.

[0231] In Tables 1 and 2, as well as also the following Tables 3 to 24 in Examples 2 to 12, the columns are designated as follows:
[0232] No.: Consecutive number from 1-50, corresponding to the best p-values
[0233] best_pheno: Phenotype (drug) with smallest adj. p-value
[0234] best_pheno_class: drug class of best drug
[0235] best_pv: adj. p-value of best phenotype calculated using Fisher's exact test and adjusted by FDR (Benjamini Hochberg) method (Benjamini Hochberg, 1995)
[0236] sign_phenos: names of all phenotypes with significant adj. p-value separated by “i”
[0237] sign_phenos_class: drug classes of all significant drugs
[0238] num_<drug class>: number of significant drugs of that drug class
[0239] <phenotype>_pv_adj: adjusted p-value of the phenotype calculated using Fisher's exact test and adjusted by FDR (Benjamini Hochberg) method (Benjamini Hochberg, 1995)
[0240] Centroid (gene) annotation:
   [0241] Locus.Tag: Locus of the gene in the genome
   [0242] Gene.Symbol: Gene symbol
   [0243] GeneBank.Accession: GeneBank ID for the gene
   [0244] Chromosom: If gene lies on a plasmids, this column contains plasmid name
   [0245] Start.Coord/End.Coord: Start and end coordinates of the gene
   [0246] Strand: “+” for forward and “−” for reverse strand
   [0247] Scaffold.ID: (IMG) ID of the scaffold containing the gene
   [0248] Scaffold.External.Accession: Non-IMG ID, e.g. as annotated at the NCBI, RefSeq ID
   [0249] Scaffold.Name: Genome name and scaffold external accession ID

TABLE 1a
Data for Acinetobacter, particularly Acinetobacter baumanii

| | Scaffold.External | | |
|---|---|---|---|
| No. | Accession | Scaffold.Name | best_pv |
| 1 | CP001921 | Acinetobacter baumannii 1656-2: CP001921 | 7.16783907123597e−62 |
| 2 | NZ_ACYR01000063 | Acinetobacter sp. 6013113 NZ_ACYR01000063: NZ_ACYR01000063 | 1.39202289199418e−61 |
| 3 | NC_009085 | Acinetobacter baumannii ATCC 17978: NC_009085 | 1.43720401820086e−56 |
| 4 | NC_011595 | Acinetobacter baumannii AB307-0294: NC_011595 | 5.41948460225177e−51 |
| 5 | NC_011595 | Acinetobacter baumannii AB307-0294: NC_011595 | 7.00413054521082e−47 |
| 6 | NC_011586 | Acinetobacter baumannii AB0057: NC_011586 | 2.06435524702153e−46 |
| 7 | NC_011586 | Acinetobacter baumannii AB0057: NC_011586 | 8.98962816077673e−46 |
| 8 | NC_011595 | Acinetobacter baumannii AB307-0294: NC_011595 | 2.76883973579195e−44 |
| 9 | NC_011586 | Acinetobacter baumannii AB0057: NC_011586 | 6.86281420221907e−43 |
| 10 | NZ_ABXK01000013 | Acinetobacter baumannii AB900: NZ_ABXK01000013 | 5.20862955909241e−42 |
| 11 | NZ_GG704495 | Acinetobacter sp. RUH2624 genomic scaffold supercont1.1: NZ_GG704495 | 9.06181183555984e−42 |
| 12 | NZ_GG704515 | Acinetobacter sp. RUH2624 genomic scaffold supercont1.21: NZ_GG704515 | 9.06181183555984e−42 |
| 13 | NZ_GG704515 | Acinetobacter sp. RUH2624 genomic scaffold supercont1.21: NZ_GG704515 | 9.06181183555984e−42 |
| 14 | NC_014259 | Acinetobacter sp. DR1 chromosome: NC_014259 | 9.06181183555984e−42 |
| 15 | NZ_GG704949 | Acinetobacter calcoaceticus RUH2202 genomic scaffold supercont1.1: | 9.06181183555984e−42 |
| | | NZ_GG704949 | |
| 16 | NZ_GG704515 | Acinetobacter sp. RUH2624 genomic scaffold supercont1.21: NZ_GG704515 | 9.06181183555984e−42 |
| 17 | CP002177 | Acinetobacter calcoaceticus PHEA-2: CP002177 | 9.06181183555984e−42 |
| 18 | NZ_GG704515 | Acinetobacter sp. RUH2624 genomic scaffold supercont1.21: NZ_GG704515 | 3.84309843417235e−41 |
| 19 | NZ_GG704495 | Acinetobacter sp. RUH2624 genomic scaffold supercont1.1: NZ_GG704495 | 3.89818602393582e−41 |
| 20 | NC_005966 | Acinetobacter sp. ADP1: NC_005966 | 1.28694655921313e−40 |
| 21 | NZ_GG704515 | Acinetobacter sp. RUH2624 genomic scaffold supercont1.21: NZ_GG704515 | 1.49093940399756e−40 |
| 22 | NC_011595 | Acinetobacter baumannii A3307-0294: NC_011595 | 7.70079013246134e−40 |
| 23 | CP002522 | Acinetobacter baumannii TCDC-AB0715: CP002522 | 9.96749396638303e−40 |
| 24 | NC_011595 | Acinetobacter baumannii AB307-0294: NC_011595 | 1.66049576626689e−39 |
| 25 | NC_011586 | Acinetobacter baumannii AB0057: NC_011586 | 2.08472354496451e−39 |
| 26 | NC_014259 | Acinetobacter sp. DR1 chromosome: NC_014259 | 6.40954171412503e−39 |
| 27 | NZ_GG705093 | Acinetobacter lwoffii SH145 genomic scaffold supercont1.39: NZ_GG705093 | 1.2155660857651e−38 |
| 28 | NZ_ACYQ01000024 | Acinetobacter sp. 6013150 NZ_ACYQ01000024: NZ_ACYQ01000024 | 2.19910980623625e−38 |
| 29 | NZ_GG704532 | Acinetobacter sp. RUH2624 genomic scaffold supercont1.38: NZ_GG704532 | 5.31361687748575e−38 |
| 30 | NZ_ACYS01000159 | Acinetobacter sp. 6014059 NZ_ACYS01000159: NZ_ACYS01000159 | 6.25755791192393e−38 |
| 31 | NC_010611 | Acinetobacter baumannii ACICU: NC_010611 | 1.6998208344511e−37 |
| 32 | NZ_GG753601 | Acinetobacter sp. SH024 genomic scaffold supercont1.2: NZ_GG753601 | 2.25174704599278e−37 |
| 33 | CP002522 | Acinetobacter baumannii TCDC-AB0715: CP002522 | 2.43979456355917e−37 |
| 34 | NZ_GG704979 | Acinetobacter johnsonii SH046 genomic scaffold supercont1.16: NZ_GG704979 | 3.21441196797496e−37 |
| 35 | NC_011586 | Acinetobacter baumannii AB0057: NC_011586 | 4.65662453496211e−37 |
| 36 | NC_011586 | Acinetobacter baumannii AB0057: NC_011586 | 4.97462543315347e−37 |
| 37 | NC_010611 | Acinetobacter baumannii ACICU: NC_010611 | 5.86970772802613e−37 |
| 38 | CP002522 | Acinetobacter baumannii TCDC-AB0715: CP002522 | 5.86970772802613e−37 |
| 39 | NZ_ABXK01000021 | Acinetobacter baumannii AB900: NZ_ABXK01000021 | 7.97065298524188e−37 |
| 40 | CP001921 | Acinetobacter baumannii 1656-2: CP001921 | 8.02210311363916e−37 |
| 41 | NZ_ACYQ01000067 | Acinetobacter sp. 6013150 NZ_ACYQ01000067: NZ_ACYQ01000067 | 1.04988843673196e−36 |
| 42 | NZ_GG704579 | Acinetobacter baumannii ATCC 19606 genomic scaffold supercont1.8: | 2.27416603584469e−36 |
| | | NZ_GG704579 | |
| 43 | NC_010611 | Acinetobacter baumannii ACICU: NC_010611 | 2.41369225680075e−36 |
| 44 | NZ_ADMT01000124 | Acinetobacter haemolyticus ATCC 19194 contig00185: NZ_ADMT01000124 | 8.1885528903387e−36 |
| 45 | NC_011586 | Acinetobacter baumannii AB0057: NC_011586 | 8.6668830227109e−36 |
| 46 | CP002177 | Acinetobacter calcoaceticus PHEA-2: CP002177 | 1.06688951972352e−35 |
| 47 | NZ_GG704579 | Acinetobacter baumannii ATCC 19606 genomic scaffold supercont1.8: | 1.73119071134862e−35 |
| | | NZ_GG704579 | |
| 48 | NC_011595 | Acinetobacter baumannii AB307-0294: NC_011595 | 2.17923094612776e−35 |
| 49 | NZ_GG704499 | Acinetobacter sp. RUH2624 genomic scaffold supercont1.5: NZ_GG704499 | 2.56827101997287e−35 |
| 50 | CP002522 | Acinetobacter baumannii TCDC-AB0715: CP002522 | 2.89444275071491e−35 |

TABLE 1b
Data for Acinetobacter, particularly Acinetobacter baumanii (continued)

| No. | sign_phenos | sign_phenos_class | best_pheno | best_pheno_class |
|---|---|---|---|---|
| 1 | CP; GM; IMP; LVX; MER; TO; T/S | aminoglycoside; fluoroquinolone; lactam; other | CP | fluoroquinolone |
| 2 | CP; GM; IMP; LVX; MER; TO; T/S | aminoglycoside; fluoroquinolone; lactam; other | CP | fluoroquinolone |
| 3 | CP; GM; IMP; LVX; MER; TO; T/S | aminoglycoside; fluoroquinolone; lactam; other | CP | fluoroquinolone |
| 4 | CP; GM; IMP; LVX; MER; TO; T/S | aminoglycoside; fluoroquinolone; lactam; other | CP | fluoroquinolone |
| 5 | CP; GM; IMP; LVX; MER; TO; T/S | aminoglycoside; fluoroquinolone; lactam; other | CP | fluoroquinolone |
| 6 | CP; GM; IMP; LVX; MER; TO; T/S | aminoglycoside; fluoroquinolone; lactam; other | CP | fluoroquinolone |
| 7 | CP; GM; IMP; LVX; MER; TO; T/S | aminoglycoside; fluoroquinolone; lactam; other | CP | fluoroquinolone |
| 8 | CP; GM; IMP; LVX; MER; TO; T/S | aminoglycoside; fluoroquinolone; lactam; other | CP | fluoroquinolone |
| 9 | CP; GM; IMP; LVX; MER; TO; T/S | aminoglycoside; fluoroquinolone; lactam; other | CP | fluoroquinolone |
| 10 | CP; GM; IMP; LVX; MER; TO; T/S | aminoglycoside; fluoroquinolone; lactam; other | CP | fluoroquinolone |
| 11 | CP; GM; IMP; LVX; MER; TO; T/S | aminoglycoside; fluoroquinolone; lactam; other | CP | fluoroquinolone |
| 12 | CP; GM; IMP; LVX; MER; TO; T/S | aminoglycoside; fluoroquinolone; lactam; other | CP | fluoroquinolone |
| 13 | CP; GM; IMP; LVX; MER; TO; T/S | aminoglycoside; fluoroquinolone; lactam; other | CP | fluoroquinolone |
| 14 | CP; GM; IMP; LVX; MER; TO; T/S | aminoglycoside; fluoroquinolone; lactam; other | CP | fluoroquinolone |
| 15 | CP; GM; IMP; LVX; MER; TO; T/S | aminoglycoside; fluoroquinolone; lactam; other | CP | fluoroquinolone |
| 16 | CP; GM; IMP; LVX; MER; TO; T/S | aminoglycoside; fluoroquinolone; lactam; other | CP | fluoroquinolone |
| 17 | CP; GM; IMP; LVX; MER; TO; T/S | aminoglycoside; fluoroquinolone; lactam; other | CP | fluoroquinolone |
| 18 | CP; GM; IMP; LVX; MER; TO; T/S | aminoglycoside; fluoroquinolone; lactam; other | CP | fluoroquinolone |
| 19 | CP; GM; IMP; LVX; MER; TO; T/S | aminoglycoside; fluoroquinolone; lactam; other | CP | fluoroquinolone |
| 20 | CP; GM; IMP; LVX; MER; TO; T/S | aminoglycoside; fluoroquinolone; lactam; other | CP | fluoroquinolone |
| 21 | CP; GM; IMP; LVX; MER; TO; T/S | aminoglycoside; fluoroquinolone; lactam; other | CP | fluoroquinolone |
| 22 | CP; GM; IMP; LVX; MER; TO; T/S | aminoglycoside; fluoroquinolone; lactam; other | CP | fluoroquinolone |
| 23 | CP; GM; IMP; LVX; MER; TO; T/S | aminoglycoside; fluoroquinolone; lactam; other | CP | fluoroquinolone |
| 24 | CP; GM; IMP; LVX; MER; TO; T/S | aminoglycoside; fluoroquinolone; lactam; other | CP | fluoroquinolone |
| 25 | CP; GM; IMP; LVX; MER; TO; T/S | aminoglycoside; fluoroquinolone; lactam; other | LVX | fluoroquinolone |
| 26 | CP; GM; IMP; LVX; MER; TO; T/S | aminoglycoside; fluoroquinolone; lactam; other | CP | fluoroquinolone |
| 27 | CP; GM; IMP; LVX; MER; TO; T/S | aminoglycoside; fluoroquinolone; lactam; other | LVX | fluoroquinolone |
| 28 | CP; GM; IMP; LVX; MER; TO; T/S | aminoglycoside; fluoroquinolone; lactam; other | CP | fluoroquinolone |
| 29 | CP; GM; IMP; LVX; MER; TO; T/S | aminoglycoside; fluoroquinolone; lactam; other | LVX | fluoroquinolone |
| 30 | CP; GM; IMP; LVX; MER; TO; T/S | aminoglycoside; fluoroquinolone; lactam; other | CP | fluoroquinolone |
| 31 | CP; GM; IMP; LVX; MER; TO; T/S | aminoglycoside; fluoroquinolone; lactam; other | CP | fluoroquinolone |
| 32 | CP; GM; IMP; LVX; MER; TO; T/S | aminoglycoside; fluoroquinolone; lactam; other | CP | fluoroquinolone |
| 33 | CP; GM; IMP; LVX; MER; TO; T/S | aminoglycoside; fluoroquinolone; lactam; other | CP | fluoroquinolone |
| 34 | CP; GM; IMP; LVX; MER; TO; T/S | aminoglycoside; fluoroquinolone; lactam; other | CP | fluoroquinolone |
| 35 | CP; GM; IMP; LVX; MER; TO; T/S | aminoglycoside; fluoroquinolone; lactam; other | CP | fluoroquinolone |
| 36 | CP; GM; IMP; LVX; MER; TO; T/S | aminoglycoside; fluoroquinolone; lactam; other | CP | fluoroquinolone |
| 37 | CP; GM; IMP; LVX; MER; TO; T/S | aminoglycoside; fluoroquinolone; lactam; other | CP | fluoroquinolone |
| 38 | CP; GM; IMP; LVX; MER; TO; T/S | aminoglycoside; fluoroquinolone; lactam; other | CP | fluoroquinolone |
| 39 | CP; GM; IMP; LVX; MER; TO; T/S | aminoglycoside; fluoroquinolone; lactam; other | CP | fluoroquinolone |
| 40 | CP; GM; IMP; LVX; MER; TO; T/S | aminoglycoside; fluoroquinolone; lactam; other | LVX | fluoroquinolone |
| 41 | CP; GM; IMP; LVX; MER; TO; T/S | aminoglycoside; fluoroquinolone; lactam; other | CP | fluoroquinolone |
| 42 | CP; GM; IMP; LVX; MER; TO; T/S | aminoglycoside; fluoroquinolone; lactam; other | T/S | other |
| 43 | CP; GM; IMP; LVX; MER; TO; T/S | aminoglycoside; fluoroquinolone; lactam; other | LVX | fluoroquinolone |
| 44 | CP; GM; IMP; LVX; MER; TO; T/S | aminoglycoside; fluoroquinolone; lactam; other | LVX | fluoroquinolone |
| 45 | CP; GM; IMP; LVX; MER; TO; T/S | aminoglycoside; fluoroquinolone; lactam; other | CP | fluoroquinolone |
| 46 | CP; GM; IMP; LVX; MER; TO; T/S | aminoglycoside; fluoroquinolone; lactam; other | CP | fluoroquinolone |
| 47 | CP; GM; IMP; LVX; MER; TO; T/S | aminoglycoside; fluoroquinolone; lactam; other | T/S | other |
| 48 | CP; GM; IMP; LVX; MER; TO; T/S | aminoglycoside; fluoroquinolone; lactam; other | CP | fluoroquinolone |
| 49 | CP; GM; IMP; LVX; MER; TO; T/S | aminoglycoside; fluoroquinolone; lactam; other | CP | fluoroquinolone |
| 50 | CP; GM; IMP; LVX; MER; TO; T/S | aminoglycoside; fluoroquinolone; lactam; other | CP | fluoroquinolone |

TABLE 1c
Data for Acinetobacter, particularly Acinetobacter baumanii (continued)

| No. | num_aminoglycoside | num_fluoroquinolone | num_lactam | num_other |
|---|---|---|---|---|
| 1 | 2 | 2 | 2 | 1 |
| 2 | 2 | 2 | 2 | 1 |
| 3 | 2 | 2 | 2 | 1 |
| 4 | 2 | 2 | 2 | 1 |
| 5 | 2 | 2 | 2 | 1 |
| 6 | 2 | 2 | 2 | 1 |
| 7 | 2 | 2 | 2 | 1 |
| 8 | 2 | 2 | 2 | 1 |
| 9 | 2 | 2 | 2 | 1 |
| 10 | 2 | 2 | 2 | 1 |
| 11 | 2 | 2 | 2 | 1 |
| 12 | 2 | 2 | 2 | 1 |
| 13 | 2 | 2 | 2 | 1 |
| 14 | 2 | 2 | 2 | 1 |
| 15 | 2 | 2 | 2 | 1 |
| 16 | 2 | 2 | 2 | 1 |
| 17 | 2 | 2 | 2 | 1 |
| 18 | 2 | 2 | 2 | 1 |
| 19 | 2 | 2 | 2 | 1 |
| 20 | 2 | 2 | 2 | 1 |
| 21 | 2 | 2 | 2 | 1 |
| 22 | 2 | 2 | 2 | 1 |
| 23 | 2 | 2 | 2 | 1 |
| 24 | 2 | 2 | 2 | 1 |
| 25 | 2 | 2 | 2 | 1 |
| 26 | 2 | 2 | 2 | 1 |
| 27 | 2 | 2 | 2 | 1 |
| 28 | 2 | 2 | 2 | 1 |
| 29 | 2 | 2 | 2 | 1 |
| 30 | 2 | 2 | 2 | 1 |
| 31 | 2 | 2 | 2 | 1 |
| 32 | 2 | 2 | 2 | 1 |
| 33 | 2 | 2 | 2 | 1 |
| 34 | 2 | 2 | 2 | 1 |
| 35 | 2 | 2 | 2 | 1 |
| 36 | 2 | 2 | 2 | 1 |
| 37 | 2 | 2 | 2 | 1 |
| 38 | 2 | 2 | 2 | 1 |
| 39 | 2 | 2 | 2 | 1 |
| 40 | 2 | 2 | 2 | 1 |
| 41 | 2 | 2 | 2 | 1 |
| 42 | 2 | 2 | 2 | 1 |
| 43 | 2 | 2 | 2 | 1 |
| 44 | 2 | 2 | 2 | 1 |
| 45 | 2 | 2 | 2 | 1 |
| 46 | 2 | 2 | 2 | 1 |
| 47 | 2 | 2 | 2 | 1 |
| 48 | 2 | 2 | 2 | 1 |
| 49 | 2 | 2 | 2 | 1 |
| 50 | 2 | 2 | 2 | 1 |

TABLE 1d
Data for Acinetobacter, particularly Acinetobacter baumanii (continued)

| No. | CP_pv_adj | GM_pv_adj | IMP_pv_adj | LVX_pv_adj | MER_pv_adj | TO_pv_adj | T/S_pv_adj |
|---|---|---|---|---|---|---|---|
| 1 | 7.17E−34 | 7.62E−37 | 2.99E−16 | 2.51E−58 | 1.71E−29 | 3.85E−19 | 7.12E−37 |
| 2 | 1.39E−61 | 2.93E−36 | 2.52E−16 | 1.14E−57 | 1.26E−28 | 1.01E−18 | 2.48E−36 |
| 3 | 1.44E−56 | 1.41E−30 | 7.92E−24 | 2.33E−56 | 4.63E−35 | 1.23E−15 | 1.16E−31 |
| 4 | 5.42E−51 | 1.20E−26 | 3.83E−16 | 1.97E−49 | 3.77E−19 | 6.39E−14 | 5.70E−30 |
| 5 | 7.00E−47 | 7.36E−25 | 7.07E−15 | 3.32E−45 | 1.76E−24 | 2.16E−14 | 1.06E−32 |
| 6 | 2.06E−46 | 1.72E−23 | 1.92E−08 | 3.46E−46 | 2.40E−18 | 1.64E−13 | 3.34E−31 |
| 7 | 8.99E−46 | 1.85E−24 | 2.19E−15 | 2.93E−44 | 1.16E−24 | 3.33E−14 | 3.29E−31 |
| 8 | 2.77E−44 | 1.51E−23 | 2.19E−15 | 5.38E−43 | 1.16E−24 | 3.33E−14 | 3.45E−30 |
| 9 | 6.86E−43 | 1.15E−22 | 4.78E−15 | 1.09E−41 | 3.50E−24 | 5.85E−13 | 2.90E−29 |
| 10 | 5.21E−42 | 7.13E−19 | 3.88E−19 | 3.01E−41 | 3.46E−19 | 1.35E−06 | 1.20E−22 |
| 11 | 9.06E−42 | 1.74E−21 | 5.28E−11 | 6.20E−39 | 2.05E−18 | 9.48E−14 | 2.09E−27 |
| 12 | 9.06E−42 | 1.40E−20 | 1.57E−11 | 1.29E−40 | 2.50E−19 | 2.12E−13 | 1.47E−25 |
| 13 | 9.06E−42 | 1.40E−20 | 1.57E−11 | 1.29E−40 | 2.50E−19 | 2.12E−13 | 1.47E−25 |
| 14 | 9.06E−42 | 1.26E−22 | 4.71E−10 | 1.24E−38 | 1.59E−17 | 1.36E−14 | 1.16E−28 |
| 15 | 9.06E−42 | 1.40E−20 | 1.57E−11 | 1.29E−40 | 2.50E−19 | 2.12E−13 | 1.47E−25 |
| 16 | 9.06E−42 | 1.40E−20 | 1.57E−11 | 1.29E−40 | 2.50E−19 | 2.12E−13 | 1.47E−25 |
| 17 | 9.06E−42 | 1.40E−20 | 1.57E−11 | 1.29E−40 | 2.50E−19 | 2.12E−13 | 1.47E−25 |
| 18 | 3.84E−41 | 4.26E−21 | 5.48E−11 | 2.25E−38 | 2.28E−18 | 1.85E−13 | 1.34E−28 |
| 19 | 3.90E−41 | 3.00E−22 | 8.17E−10 | 4.60E−38 | 3.07E−17 | 2.60E−14 | 3.05E−28 |
| 20 | 1.29E−40 | 2.54E−23 | 8.32E−09 | 2.28E−37 | 2.98E−16 | 7.17E−15 | 4.45E−29 |
| 21 | 1.49E−40 | 1.06E−20 | 9.78E−11 | 8.02E−38 | 4.26E−18 | 3.58E−13 | 1.41E−26 |
| 22 | 7.70E−40 | 2.19E−21 | 2.55E−13 | 8.73E−40 | 2.71E−22 | 1.30E−12 | 9.73E−29 |
| 23 | 9.97E−40 | 1.94E−20 | 5.69E−10 | 6.32E−37 | 5.09E−15 | 3.42E−13 | 4.53E−25 |
| 24 | 1.66E−39 | 2.25E−21 | 1.11E−11 | 4.74E−37 | 9.11E−19 | 4.30E−12 | 6.58E−28 |
| 25 | 6.97E−38 | 2.51E−23 | 4.39E−17 | 2.08E−39 | 2.11E−31 | 2.81E−20 | 2.62E−29 |
| 26 | 6.41E−39 | 8.82E−20 | 8.32E−09 | 2.28E−37 | 8.45E−15 | 5.48E−12 | 1.80E−23 |
| 27 | 1.21E−36 | 6.79E−22 | 2.00E−18 | 1.22E−38 | 1.37E−30 | 1.91E−20 | 1.86E−29 |
| 28 | 2.20E−38 | 6.34E−16 | 1.51E−04 | 3.00E−37 | 3.02E−15 | 2.23E−05 | 5.58E−26 |
| 29 | 2.16E−37 | 5.62E−21 | 1.99E−11 | 5.31E−38 | 4.07E−20 | 1.62E−14 | 1.79E−33 |
| 30 | 6.26E−38 | 1.31E−11 | 3.04E−05 | 7.55E−37 | 2.46E−19 | 5.99E−05 | 3.36E−19 |
| 31 | 1.70E−37 | 9.89E−20 | 4.00E−15 | 6.17E−33 | 1.59E−19 | 1.06E−07 | 5.60E−19 |
| 32 | 2.25E−37 | 3.62E−20 | 5.26E−16 | 3.31E−34 | 9.82E−23 | 4.38E−09 | 5.82E−22 |
| 33 | 2.44E−37 | 6.97E−16 | 4.33E−14 | 7.77E−37 | 9.30E−19 | 4.18E−07 | 1.39E−20 |
| 34 | 3.21E−37 | 1.12E−20 | 1.05E−11 | 3.70E−36 | 1.02E−20 | 3.75E−13 | 1.16E−24 |
| 35 | 4.66E−37 | 5.92E−20 | 3.00E−11 | 4.04E−32 | 8.17E−17 | 5.55E−10 | 2.22E−21 |
| 36 | 4.97E−37 | 9.12E−20 | 3.90E−11 | 7.27E−35 | 8.20E−18 | 2.95E−11 | 2.78E−26 |
| 37 | 5.87E−37 | 1.44E−15 | 3.36E−14 | 2.00E−36 | 3.55E−19 | 3.60E−07 | 3.09E−20 |
| 38 | 5.87E−37 | 1.44E−15 | 2.29E−13 | 2.00E−36 | 2.38E−18 | 1.01E−06 | 4.30E−21 |
| 39 | 7.97E−37 | 1.41E−20 | 4.11E−10 | 1.69E−34 | 6.22E−17 | 1.57E−12 | 9.61E−26 |
| 40 | 8.02E−36 | 1.02E−16 | 8.36E−13 | 8.02E−37 | 6.77E−18 | 2.61E−10 | 1.91E−19 |
| 41 | 1.05E−36 | 5.82E−22 | 6.09E−07 | 1.09E−33 | 3.93E−12 | 9.82E−13 | 1.13E−26 |
| 42 | 2.17E−18 | 1.05E−13 | 2.19E−05 | 7.67E−17 | 1.44E−05 | 1.58E−19 | 2.27E−36 |
| 43 | 2.04E−35 | 2.18E−16 | 4.05E−13 | 2.41E−36 | 4.89E−18 | 7.30E−10 | 2.59E−18 |
| 44 | 2.30E−34 | 4.36E−15 | 1.44E−11 | 8.19E−36 | 1.06E−16 | 9.26E−09 | 1.67E−18 |
| 45 | 8.67E−36 | 6.11E−17 | 3.23E−06 | 1.48E−32 | 1.25E−11 | 1.06E−09 | 8.79E−25 |
| 46 | 1.07E−35 | 6.07E−21 | 9.46E−09 | 3.15E−33 | 4.04E−15 | 6.09E−14 | 1.52E−24 |
| 47 | 2.15E−17 | 3.02E−13 | 2.37E−05 | 3.26E−16 | 2.56E−05 | 2.12E−19 | 1.73E−35 |
| 48 | 2.18E−35 | 2.69E−18 | 1.65E−04 | 2.17E−32 | 2.13E−10 | 9.38E−10 | 2.81E−21 |
| 49 | 2.57E−35 | 5.01E−23 | 1.62E−06 | 3.27E−32 | 1.19E−11 | 4.78E−13 | 2.98E−26 |
| 50 | 2.89E−35 | 4.58E−19 | 5.87E−06 | 4.77E−32 | 5.92E−13 | 2.05E−11 | 8.30E−23 |

TABLE 1e
Data for Acinetobacter, particularly Acinetobacter baumanii (continued)

| | | | | |
|---|---|---|---|---|
| No. | Locus.Tag | Gene.Symbol | GenBank.Accession | Chromosome |

| | | | |
|---|---|---|---|
| 1 | ABK1_1135 | | ADX02769 |
| 2 | A60131_010100011170 | | ZP_06783174 |
| 3 | A1S_0690 | | YP_001083736 |
| 4 | ABBFA_001710 | | YP_002325613 |
| 5 | ABBFA_001640 | | YP_002325543 |
| 6 | AB57_1876 | | YP_002319238 |
| 7 | AB57_2151 | | YP_002319507 |
| 8 | ABBFA_001638 | | YP_002325541 |
| 9 | AB57_2147 | | YP_002319503 |
| 10 | AbauAB_010100009672 | | ZP_04661877 |
| 11 | HMPREF0014_00181 | | ZP_05823167 |
| 12 | HMPREF0014_02450 | | ZP_05825436 |
| 13 | HMPREF0014_02452 | | ZP_05825438 |
| 14 | AOLE_17735 | | YP_003733805 |
| 15 | HMPREF0012_01352 | | ZP_06057184 |
| 16 | HMPREF0014_02453 | | ZP_05825439 |
| 17 | BDGL_001498 | ocd2 | ADY82084 |
| 18 | HMPREF0014_02489 | | ZP_05825475 |
| 19 | HMPREF0014_00004 | | ZP_05822990 |
| 20 | ACIAD0370 | rbfA | YP_045140 |
| 21 | HMPREF0014_02492 | | ZP_05825478 |
| 22 | ABBFA_001637 | | YP_002325540 |
| 23 | ABTW07_1894 | | ADX92323 |
| 24 | ABBFA_000343 | | YP_002324276 |
| 25 | AB57_2771 | | YP_002320110 |
| 26 | AOLE_17690 | | YP_003733796 |
| 27 | HMPREF0017_03097 | | ZP_06071176 |
| 28 | A6013_010100003618 | | ZP_06795427 |
| 29 | HMPREF0014_03338 | | ZP_05826324 |
| 30 | A6014_010100015962 | | ZP_06788050 |
| 31 | ACICU_00639 | filE | YP_001845298 |
| 32 | HMPREF0013_02137 | | ZP_06692288 |
| 33 | ABTW07_2865 | | ADX93289 |
| 34 | HMPREF0016_03291 | | ZP_06064821 |
| 35 | AB57_2131 | | YP_002319487 |
| 36 | AB57_3624 | pilV | YP_002320921 |
| 37 | ACICU_02614 | | YP_001847273 |
| 38 | ABTW07_2863 | | ADX93287 |
| 39 | AbauAB_010100013685 | | ZP_04662667 |
| 40 | ABK1_2278 | | ADX03912 |
| 41 | A6013_010100009420 | | ZP_06796568 |
| 42 | HMPREF0010_03320 | | ZP_05829937 |
| 43 | ACICU_01819 | | YP_001846478 |
| 44 | HMP0015_1294 | | ZP_06727085 |
| 45 | AB57_1430 | | YP_002318806 |
| 46 | BDGL_000595 | | ADY81181 |
| 47 | HMPREF0010_03319 | | ZP_05829936 |
| 48 | ABBFA_001847 | | YP_002325750 |
| 49 | HMPREF0014_00860 | | ZP_05823846 |
| 50 | ABTW07_1891 | | ADX92320 |

TABLE 1f
Data for Acinetobacter, particularly
Acinetobacter baumanii (continued)

| No. | Start.Coord | End.Coord | Strand | Scaffold.ID |
|---|---|---|---|---|
| 1 | 1235814 | 1236425 | + | 650377914 |
| 2 | 64 | 768 | + | 647008664 |
| 3 | 821275 | 822057 | + | 640069344 |
| 4 | 1834753 | 1835667 | − | 643348583 |
| 5 | 1759838 | 1761280 | + | 643348583 |
| 6 | 1966831 | 1969149 | + | 643348581 |
| 7 | 2232790 | 2233716 | − | 643348581 |
| 8 | 1757930 | 1758571 | − | 643348583 |
| 9 | 2226774 | 2228099 | + | 643348581 |
| 10 | 63870 | 65015 | − | 645061599 |
| 11 | 195165 | 195419 | + | 647535325 |
| 12 | 27528 | 28301 | − | 647535345 |
| 13 | 31818 | 33023 | − | 647535345 |
| 14 | 3783514 | 3783789 | + | 648028017 |
| 15 | 1494626 | 1495630 | + | 646207323 |
| 16 | 33027 | 34796 | − | 647535345 |
| 17 | 1603798 | 1604811 | + | 650377930 |
| 18 | 74534 | 74893 | + | 647535345 |
| 19 | 1819 | 2325 | − | 647535325 |
| 20 | 363575 | 363976 | + | 637000277 |
| 21 | 76454 | 76681 | + | 647535345 |
| 22 | 1757594 | 1757890 | − | 643348583 |
| 23 | 2004366 | 2004983 | + | 650378014 |
| 24 | 370977 | 371978 | + | 643348583 |
| 25 | 2838051 | 2838620 | − | 643348581 |
| 26 | 3773081 | 3773467 | + | 648028017 |
| 27 | 716 | 1162 | + | 646207467 |
| 28 | 6958 | 7416 | − | 647008417 |
| 29 | 12541 | 13101 | − | 647535362 |
| 30 | 7588 | 7713 | + | 647009002 |
| 31 | 705957 | 707216 | + | 642555129 |
| 32 | 856694 | 857281 | − | 647536755 |
| 33 | 3040319 | 3041707 | − | 650378014 |
| 34 | 4553 | 4768 | − | 646207353 |
| 35 | 2213458 | 2214801 | − | 643348581 |
| 36 | 3730668 | 3731222 | − | 643348581 |
| 37 | 2775538 | 2776941 | + | 642555129 |
| 38 | 3038397 | 3039893 | − | 650378014 |
| 39 | 70983 | 71513 | − | 645061607 |
| 40 | 2403829 | 2405136 | + | 650377914 |
| 41 | 2603 | 3454 | + | 647008460 |
| 42 | 159696 | 159998 | + | 647535409 |
| 43 | 1941428 | 1942675 | + | 642555129 |
| 44 | 1088 | 2629 | − | 647018944 |
| 45 | 1505450 | 1506382 | + | 643348581 |
| 46 | 622112 | 622732 | + | 650377930 |
| 47 | 158794 | 159609 | + | 647535409 |
| 48 | 1980078 | 1981988 | − | 643348583 |
| 49 | 126664 | 127845 | + | 647535329 |
| 50 | 1999835 | 2001676 | + | 650378014 |

TABLE 2a
Data for Acinetobacter, particularly Acinetobacter baumanii

| No. | Scaffold.External.Accession | Scaffold.Name | best_pv |
|---|---|---|---|
| 1 | CP001921 | Acinetobacter baumannii 1656-2: CP001921 | 7.16783907123597e−62 |
| 2 | NZ_ACYR01000063 | Acinetobacter sp. 6013113 NZ_ACYR01000063: | 1.39202289199418e−61 |
| | | NZ_ACYR01000063 | |
| 3 | NC_009085 | Acinetobacter baumannii ATCC 17978: NC_009085 | 1.43720401820086e−56 |
| 4 | NC_011595 | Acinetobacter baumannii AB307-0294: NC_011595 | 5.41948460225177e−51 |
| 5 | NC_011595 | Acinetobacter baumannii AB307-0294: NC_011595 | 7.00413054521082e−47 |
| 6 | NC_011586 | Acinetobacter baumannii AB0057: NC_011586 | 2.06435524702153e−46 |
| 7 | NC_011586 | Acinetobacter baumannii AB0057: NC_011586 | 8.98962816077673e−46 |
| 8 | NC_011595 | Acinetobacter baumannii AB307-0294: NC_011595 | 2.76883973579195e−44 |
| 9 | NC_011586 | Acinetobacter baumannii AB0057: NC_011586 | 6.86281420221907e−43 |
| 10 | NZ_ABXK01000013 | Acinetobacter baumannii AB900: NZ_ABXK01000013 | 5.20862955909241e−42 |
| 11 | NZ_GG704495 | Acinetobacter sp. RUH2624 genomic scaffold | 9.06181183555984e−42 |
| | | supercont1.1: NZ_GG704495 | |
| 12 | NZ_GG704515 | Acinetobacter sp. RUH2624 genomic scaffold | 9.06181183555984e−42 |
| | | supercont1.21: NZ_GG704515 | |
| 13 | NZ_GG704515 | Acinetobacter sp. RUH2624 genomic scaffold | 9.06181183555984e−42 |
| | | supercont1.21: NZ_GG704515 | |
| 14 | NC_014259 | Acinetobacter sp. DR1 chromosome: NC_014259 | 9.06181183555984e−42 |
| 15 | NZ_GG704949 | Acinetobacter calcoaceticus RUH2202 genomic | 9.06181183555984e−42 |
| | | scaffold supercont1.1: NZ_GG704949 | |
| 16 | NZ_GG704515 | Acinetobacter sp. RUH2624 genomic scaffold | 9.06181183555984e−42 |
| | | supercont1.21: NZ_GG704515 | |
| 17 | CP002177 | Acinetobacter calcoaceticus PHEA-2: CP002177 | 9.06181183555984e−42 |
| 18 | NZ_GG704515 | Acinetobacter sp. RUH2624 genomic scaffold | 3.84309843417235e−41 |
| | | supercont1.21: NZ_GG704515 | |
| 19 | NZ_GG704495 | Acinetobacter sp. RUH2624 genomic scaffold | 3.89818602393582e−41 |
| | | supercont1.1: NZ_GG704495 | |
| 20 | NC_005966 | Acinetobacter sp. ADP1: NC_005966 | 1.28694655921313e−40 |
| 21 | NZ_GG704515 | Acinetobacter sp. RUH2624 genomic scaffold | 1.49093940399756e−40 |
| | | supercont1.21: NZ_GG704515 | |
| 22 | NC_011595 | Acinetobacter baumannii AB307-0294: NC_011595 | 7.70079013246134e−40 |
| 23 | CP002522 | Acinetobacter baumannii TCDC-AB0715: CP002522 | 9.96749396638303e−40 |
| 24 | NC_011595 | Acinetobacter baumannii AB307-0294: NC_011595 | 1.66049576626689e−39 |
| 25 | NC_011586 | Acinetobacter baumannii AB0057: NC_011586 | 2.08472354496451e−39 |
| 26 | NC_014259 | Acinetobacter sp. DR1 chromosome: NC_014259 | 6.40954171412503e−39 |
| 27 | NZ_GG705093 | Acinetobacter lwoffii SH145 genomic scaffold | 1.2155660857651e−38 |
| | | supercont1.39: NZ_GG705093 | |
| 28 | NZ_ACYQ01000024 | Acinetobacter sp. 6013150 NZ_ACYQ01000024: | 2.19910980623625e−38 |
| | | NZ_ACYQ01000024 | |
| 29 | NZ_GG704532 | Acinetobacter sp. RUH2624 genomic scaffold | 5.31361687748575e−38 |
| | | supercont1.38: NZ_GG704532 | |
| 30 | NZ_ACYS01000159 | Acinetobacter sp. 6014059 NZ_ACYS01000159: | 6.25755791192393e−38 |
| | | NZ_ACYS01000159 | |
| 31 | NC_010611 | Acinetobacter baumannii ACICU: NC_010611 | 1.6998208344511e−37 |
| 32 | NZ_GG753601 | Acinetobacter sp. SH024 genomic scaffold | 2.25174704599278e−37 |
| | | supercont1.2: NZ_GG753601 | |
| 33 | CP002522 | Acinetobacter baumannii TCDC-AB0715: CP002522 | 2.43979456355917e−37 |
| 34 | NZ_GG704979 | Acinetobacter johnsonii SH046 genomic scaffold | 3.21441196797496e−37 |
| | | supercont1.16: NZ_GG704979 | |
| 35 | NC_011586 | Acinetobacter baumannii AB0057: NC_011586 | 4.65662453496211e−37 |
| 36 | NC_011586 | Acinetobacter baumannii AB0057: NC_011586 | 4.97462543315347e−37 |
| 37 | NC_010611 | Acinetobacter baumannii ACICU: NC_010611 | 5.86970772802613e−37 |
| 38 | CP002522 | Acinetobacter baumannii TCDC-AB0715: CP002522 | 5.86970772802613e−37 |
| 39 | NZ_ABXK01000021 | Acinetobacter baumannii AB900: NZ_ABXK01000021 | 7.97065298524188e−37 |
| 40 | CP001921 | Acinetobacter baumannii 1656-2: CP001921 | 8.02210311363916e−37 |
| 41 | NZ_ACYQ01000067 | Acinetobacter sp. 6013150 NZ_ACYQ01000067: | 1.04988843673196e−36 |
| | | NZ_ACYQ01000067 | |
| 42 | NZ_GG704579 | Acinetobacter baumannii ATCC 19606 genomic | 2.27416603584469e−36 |
| | | scaffold supercont1.8: NZ_GG704579 | |
| 43 | NC_010611 | Acinetobacter baumannii ACICU: NC_010611 | 2.41369225680075e−36 |
| 44 | NZ_ADMT01000124 | Acinetobacter haemolyticus ATCC 19194 | 8.1885528903387e−36 |
| | | contig00185: NZ_ADMT01000124 | |
| 45 | NC_011586 | Acinetobacter baumannii AB0057: NC_011586 | 8.6668830227109e−36 |
| 46 | CP002177 | Acinetobacter calcoaceticus PHEA-2: CP002177 | 1.06688951972352e−35 |
| 47 | NZ_GG704579 | Acinetobacter baumannii ATCC 19606 genomic | 1.73119071134862e−35 |
| | | scaffold supercont1.8: NZ_GG704579 | |
| 48 | NC_011595 | Acinetobacter baumannii AB307-0294: NC_011595 | 2.17923094612776e−35 |
| 49 | NZ_GG704499 | Acinetobacter sp. RUH2624 genomic scaffold | 2.56827101997287e−35 |
| | | supercont1.5: NZ_GG704499 | |
| 50 | CP002522 | Acinetobacter baumannii TCDC-AB0715: CP002522 | 2.89444275071491e−35 |

TABLE 2b
Data for Acinetobacter, particularly Acinetobacter baumanii (continued)

| No. | sign_phenos | sign_phenos_class | best_pheno | best_pheno_class |
|---|---|---|---|---|
| 1 | CP; GM; IMP; LVX; MER; TO; T/S | aminoglycoside; fluoroquinolone; lactam; other | CP | fluoroquinolone |
| 2 | CP; GM; IMP; LVX; MER; TO; T/S | aminoglycoside; fluoroquinolone; lactam; other | CP | fluoroquinolone |
| 3 | CP; GM; IMP; LVX; MER; TO; T/S | aminoglycoside; fluoroquinolone; lactam; other | CP | fluoroquinolone |
| 4 | CP; GM; IMP; LVX; MER; TO; T/S | aminoglycoside; fluoroquinolone; lactam; other | CP | fluoroquinolone |
| 5 | CP; GM; IMP; LVX; MER; TO; T/S | aminoglycoside; fluoroquinolone; lactam; other | CP | fluoroquinolone |
| 6 | CP; GM; IMP; LVX; MER; TO; T/S | aminoglycoside; fluoroquinolone; lactam; other | CP | fluoroquinolone |
| 7 | CP; GM; IMP; LVX; MER; TO; T/S | aminoglycoside; fluoroquinolone; lactam; other | CP | fluoroquinolone |
| 8 | CP; GM; IMP; LVX; MER; TO; T/S | aminoglycoside; fluoroquinolone; lactam; other | CP | fluoroquinolone |
| 9 | CP; GM; IMP; LVX; MER; TO; T/S | aminoglycoside; fluoroquinolone; lactam; other | CP | fluoroquinolone |
| 10 | CP; GM; IMP; LVX; MER; TO; T/S | aminoglycoside; fluoroquinolone; lactam; other | CP | fluoroquinolone |
| 11 | CP; GM; IMP; LVX; MER; TO; T/S | aminoglycoside; fluoroquinolone; lactam; other | CP | fluoroquinolone |
| 12 | CP; GM; IMP; LVX; MER; TO; T/S | aminoglycoside; fluoroquinolone; lactam; other | CP | fluoroquinolone |
| 13 | CP; GM; IMP; LVX; MER; TO; T/S | aminoglycoside; fluoroquinolone; lactam; other | CP | fluoroquinolone |
| 14 | CP; GM; IMP; LVX; MER; TO; T/S | aminoglycoside; fluoroquinolone; lactam; other | CP | fluoroquinolone |
| 15 | CP; GM; IMP; LVX; MER; TO; T/S | aminoglycoside; fluoroquinolone; lactam; other | CP | fluoroquinolone |
| 16 | CP; GM; IMP; LVX; MER; TO; T/S | aminoglycoside; fluoroquinolone; lactam; other | CP | fluoroquinolone |
| 17 | CP; GM; IMP; LVX; MER; TO; T/S | aminoglycoside; fluoroquinolone; lactam; other | CP | fluoroquinolone |
| 18 | CP; GM; IMP; LVX; MER; TO; T/S | aminoglycoside; fluoroquinolone; lactam; other | CP | fluoroquinolone |
| 19 | CP; GM; IMP; LVX; MER; TO; T/S | aminoglycoside; fluoroquinolone; lactam; other | CP | fluoroquinolone |
| 20 | CP; GM; IMP; LVX; MER; TO; T/S | aminoglycoside; fluoroquinolone; lactam; other | CP | fluoroquinolone |
| 21 | CP; GM; IMP; LVX; MER; TO; T/S | aminoglycoside; fluoroquinolone; lactam; other | CP | fluoroquinolone |
| 22 | CP; GM; IMP; LVX; MER; TO; T/S | aminoglycoside; fluoroquinolone; lactam; other | CP | fluoroquinolone |
| 23 | CP; GM; IMP; LVX; MER; TO; T/S | aminoglycoside; fluoroquinolone; lactam; other | CP | fluoroquinolone |
| 24 | CP; GM; IMP; LVX; MER; TO; T/S | aminoglycoside; fluoroquinolone; lactam; other | CP | fluoroquinolone |
| 25 | CP; GM; IMP; LVX; MER; TO; T/S | aminoglycoside; fluoroquinolone; lactam; other | LVX | fluoroquinolone |
| 26 | CP; GM; IMP; LVX; MER; TO; T/S | aminoglycoside; fluoroquinolone; lactam; other | CP | fluoroquinolone |
| 27 | CP; GM; IMP; LVX; MER; TO; T/S | aminoglycoside; fluoroquinolone; lactam; other | LVX | fluoroquinolone |
| 28 | CP; GM; IMP; LVX; MER; TO; T/S | aminoglycoside; fluoroquinolone; lactam; other | CP | fluoroquinolone |
| 29 | CP; GM; IMP; LVX; MER; TO; T/S | aminoglycoside; fluoroquinolone; lactam; other | LVX | fluoroquinolone |
| 30 | CP; GM; IMP; LVX; MER; TO; T/S | aminoglycoside; fluoroquinolone; lactam; other | CP | fluoroquinolone |
| 31 | CP; GM; IMP; LVX; MER; TO; T/S | aminoglycoside; fluoroquinolone; lactam; other | CP | fluoroquinolone |
| 32 | CP; GM; IMP; LVX; MER; TO; T/S | aminoglycoside; fluoroquinolone; lactam; other | CP | fluoroquinolone |
| 33 | CP; GM; IMP; LVX; MER; TO; T/S | aminoglycoside; fluoroquinolone; lactam; other | CP | fluoroquinolone |
| 34 | CP; GM; IMP; LVX; MER; TO; T/S | aminoglycoside; fluoroquinolone; lactam; other | CP | fluoroquinolone |
| 35 | CP; GM; IMP; LVX; MER; TO; T/S | aminoglycoside; fluoroquinolone; lactam; other | CP | fluoroquinolone |
| 36 | CP; GM; IMP; LVX; MER; TO; T/S | aminoglycoside; fluoroquinolone; lactam; other | CP | fluoroquinolone |
| 37 | CP; GM; IMP; LVX; MER; TO; T/S | aminoglycoside; fluoroquinolone; lactam; other | CP | fluoroquinolone |
| 38 | CP; GM; IMP; LVX; MER; TO; T/S | aminoglycoside; fluoroquinolone; lactam; other | CP | fluoroquinolone |
| 39 | CP; GM; IMP; LVX; MER; TO; T/S | aminoglycoside; fluoroquinolone; lactam; other | CP | fluoroquinolone |
| 40 | CP; GM; IMP; LVX; MER; TO; T/S | aminoglycoside; fluoroquinolone; lactam; other | LVX | fluoroquinolone |
| 41 | CP; GM; IMP; LVX; MER; TO; T/S | aminoglycoside; fluoroquinolone; lactam; other | CP | fluoroquinolone |
| 42 | CP; GM; IMP; LVX; MER; TO; T/S | aminoglycoside; fluoroquinolone; lactam; other | T/S | other |
| 43 | CP; GM; IMP; LVX; MER; TO; T/S | aminoglycoside; fluoroquinolone; lactam; other | LVX | fluoroquinolone |
| 44 | CP; GM; IMP; LVX; MER; TO; T/S | aminoglycoside; fluoroquinolone; lactam; other | LVX | fluoroquinolone |
| 45 | CP; GM; IMP; LVX; MER; TO; T/S | aminoglycoside; fluoroquinolone; lactam; other | CP | fluoroquinolone |
| 46 | CP; GM; IMP; LVX; MER; TO; T/S | aminoglycoside; fluoroquinolone; lactam; other | CP | fluoroquinolone |
| 47 | CP; GM; IMP; LVX; MER; TO; T/S | aminoglycoside; fluoroquinolone; lactam; other | T/S | other |
| 48 | CP; GM; IMP; LVX; MER; TO; T/S | aminoglycoside; fluoroquinolone; lactam; other | CP | fluoroquinolone |
| 49 | CP; GM; IMP; LVX; MER; TO; T/S | aminoglycoside; fluoroquinolone; lactam; other | CP | fluoroquinolone |
| 50 | CP; GM; IMP; LVX; MER; TO; T/S | aminoglycoside; fluoroquinolone; lactam; other | CP | fluoroquinolone |

TABLE 2c
Data for Acinetobacter, particularly Acinetobacter baumanii (continued)

| No. | num_aminoglycoside | num_fluoroquinolone | num_lactam | num_other |
|---|---|---|---|---|
| 1 | 2 | 2 | 2 | 1 |
| 2 | 2 | 2 | 2 | 1 |
| 3 | 2 | 2 | 2 | 1 |
| 4 | 2 | 2 | 2 | 1 |
| 5 | 2 | 2 | 2 | 1 |
| 6 | 2 | 2 | 2 | 1 |
| 7 | 2 | 2 | 2 | 1 |
| 8 | 2 | 2 | 2 | 1 |
| 9 | 2 | 2 | 2 | 1 |
| 10 | 2 | 2 | 2 | 1 |
| 11 | 2 | 2 | 2 | 1 |
| 12 | 2 | 2 | 2 | 1 |
| 13 | 2 | 2 | 2 | 1 |
| 14 | 2 | 2 | 2 | 1 |
| 15 | 2 | 2 | 2 | 1 |
| 16 | 2 | 2 | 2 | 1 |
| 17 | 2 | 2 | 2 | 1 |
| 18 | 2 | 2 | 2 | 1 |
| 19 | 2 | 2 | 2 | 1 |
| 20 | 2 | 2 | 2 | 1 |
| 21 | 2 | 2 | 2 | 1 |
| 22 | 2 | 2 | 2 | 1 |
| 23 | 2 | 2 | 2 | 1 |
| 24 | 2 | 2 | 2 | 1 |
| 25 | 2 | 2 | 2 | 1 |
| 26 | 2 | 2 | 2 | 1 |
| 27 | 2 | 2 | 2 | 1 |
| 28 | 2 | 2 | 2 | 1 |
| 29 | 2 | 2 | 2 | 1 |
| 30 | 2 | 2 | 2 | 1 |
| 31 | 2 | 2 | 2 | 1 |
| 32 | 2 | 2 | 2 | 1 |
| 33 | 2 | 2 | 2 | 1 |
| 34 | 2 | 2 | 2 | 1 |
| 35 | 2 | 2 | 2 | 1 |
| 36 | 2 | 2 | 2 | 1 |
| 37 | 2 | 2 | 2 | 1 |
| 38 | 2 | 2 | 2 | 1 |
| 39 | 2 | 2 | 2 | 1 |
| 40 | 2 | 2 | 2 | 1 |
| 41 | 2 | 2 | 2 | 1 |
| 42 | 2 | 2 | 2 | 1 |
| 43 | 2 | 2 | 2 | 1 |
| 44 | 2 | 2 | 2 | 1 |
| 45 | 2 | 2 | 2 | 1 |
| 46 | 2 | 2 | 2 | 1 |
| 47 | 2 | 2 | 2 | 1 |
| 48 | 2 | 2 | 2 | 1 |
| 49 | 2 | 2 | 2 | 1 |
| 50 | 2 | 2 | 2 | 1 |

TABLE 2d
Data for Acinetobacter, particularly Acinetobacter baumanii (continued)

| No. | CP_pv_adj | GM_pv_adj | IMP_pv_adj | LVX_pv_adj | MER_pv_adj | TO_pv_adj | T/S_pv_adj |
|---|---|---|---|---|---|---|---|
| 1 | 7.17E−62 | 7.62E−37 | 2.99E−16 | 2.51E−58 | 1.71E−29 | 3.85E−19 | 7.12E−37 |
| 2 | 1.39E−61 | 2.93E−36 | 2.52E−16 | 1.14E−57 | 1.26E−28 | 1.01E−18 | 2.48E−36 |
| 3 | 1.44E−56 | 1.41E−30 | 7.92E−24 | 2.33E−56 | 4.63E−35 | 1.23E−15 | 1.16E−31 |
| 4 | 5.42E−51 | 1.20E−26 | 3.83E−16 | 1.97E−49 | 3.77E−19 | 6.39E−14 | 5.70E−30 |
| 5 | 7.00E−47 | 7.36E−25 | 7.07E−15 | 3.32E−45 | 1.76E−24 | 2.16E−14 | 1.06E−32 |
| 6 | 2.06E−46 | 1.72E−23 | 1.92E−08 | 3.46E−46 | 2.40E−18 | 1.64E−13 | 3.34E−31 |
| 7 | 8.99E−46 | 1.85E−24 | 2.19E−15 | 2.93E−44 | 1.16E−24 | 3.33E−14 | 3.29E−31 |
| 8 | 2.77E−44 | 1.51E−23 | 2.19E−15 | 5.38E−43 | 1.16E−24 | 3.33E−14 | 3.45E−30 |
| 9 | 6.86E−43 | 1.15E−22 | 4.78E−15 | 1.09E−41 | 3.50E−24 | 5.85E−13 | 2.90E−29 |
| 10 | 5.21E−42 | 7.13E−19 | 3.88E−19 | 3.01E−41 | 3.46E−19 | 1.35E−06 | 1.20E−22 |
| 11 | 9.06E−42 | 1.74E−21 | 5.28E−11 | 6.20E−39 | 2.05E−18 | 9.48E−14 | 2.09E−27 |
| 12 | 9.06E−42 | 1.40E−20 | 1.57E−11 | 1.29E−40 | 2.50E−19 | 2.12E−13 | 1.47E−25 |
| 13 | 9.06E−42 | 1.40E−20 | 1.57E−11 | 1.29E−40 | 2.50E−19 | 2.12E−13 | 1.47E−25 |
| 14 | 9.06E−42 | 1.26E−22 | 4.71E−10 | 1.24E−38 | 1.59E−17 | 1.36E−14 | 1.16E−28 |
| 15 | 9.06E−42 | 1.40E−20 | 1.57E−11 | 1.29E−40 | 2.50E−19 | 2.12E−13 | 1.47E−25 |
| 16 | 9.06E−42 | 1.40E−20 | 1.57E−11 | 1.29E−40 | 2.50E−19 | 2.12E−13 | 1.47E−25 |
| 17 | 9.06E−42 | 1.40E−20 | 1.57E−11 | 1.29E−40 | 2.50E−19 | 2.12E−13 | 1.47E−25 |
| 18 | 3.84E−41 | 4.26E−21 | 5.48E−11 | 2.25E−38 | 2.28E−18 | 1.85E−13 | 1.34E−28 |
| 19 | 3.90E−41 | 3.00E−22 | 8.17E−10 | 4.60E−38 | 3.07E−17 | 2.60E−14 | 3.05E−28 |
| 20 | 1.29E−40 | 2.54E−23 | 8.32E−09 | 2.28E−37 | 2.98E−16 | 7.17E−15 | 4.45E−29 |
| 21 | 1.49E−40 | 1.06E−20 | 9.78E−11 | 8.02E−38 | 4.26E−18 | 3.58E−13 | 1.41E−26 |
| 22 | 7.70E−40 | 2.19E−21 | 2.55E−13 | 8.73E−40 | 2.71E−22 | 1.30E−12 | 9.73E−29 |
| 23 | 9.97E−40 | 1.94E−20 | 5.69E−10 | 6.32E−37 | 5.09E−15 | 3.42E−13 | 4.53E−25 |
| 24 | 1.66E−39 | 2.25E−21 | 1.11E−11 | 4.74E−37 | 9.11E−19 | 4.30E−12 | 6.58E−28 |
| 25 | 6.97E−38 | 2.51E−23 | 4.39E−17 | 2.08E−39 | 2.11E−31 | 2.81E−20 | 2.62E−29 |
| 26 | 6.41E−39 | 8.82E−20 | 8.32E−09 | 2.28E−37 | 8.45E−15 | 5.48E−12 | 1.80E−23 |
| 27 | 1.21E−36 | 6.79E−22 | 2.00E−18 | 1.22E−38 | 1.37E−30 | 1.91E−20 | 1.86E−29 |
| 28 | 2.20E−38 | 6.34E−16 | 0.00015078 | 3.00E−37 | 3.02E−15 | 2.23E−05 | 5.58E−26 |
| 29 | 2.16E−37 | 5.62E−21 | 1.99E−11 | 5.31E−38 | 4.07E−20 | 1.62E−14 | 1.79E−33 |
| 30 | 6.26E−38 | 1.31E−11 | 3.04E−05 | 7.55E−37 | 2.46E−19 | 5.99E−05 | 3.36E−19 |
| 31 | 1.70E−37 | 9.89E−20 | 4.00E−15 | 6.17E−33 | 1.59E−19 | 1.06E−07 | 5.60E−19 |
| 32 | 2.25E−37 | 3.62E−20 | 5.26E−16 | 3.31E−34 | 9.82E−23 | 4.38E−09 | 5.82E−22 |
| 33 | 2.44E−37 | 6.97E−16 | 4.33E−14 | 7.77E−37 | 9.30E−19 | 4.18E−07 | 1.39E−20 |
| 34 | 3.21E−37 | 1.12E−20 | 1.05E−11 | 3.70E−36 | 1.02E−20 | 3.75E−13 | 1.16E−24 |
| 35 | 4.66E−37 | 5.92E−20 | 3.00E−11 | 4.04E−32 | 8.17E−17 | 5.55E−10 | 2.22E−21 |
| 36 | 4.97E−37 | 9.12E−20 | 3.90E−11 | 7.27E−35 | 8.20E−18 | 2.95E−11 | 2.78E−26 |
| 37 | 5.87E−37 | 1.44E−15 | 3.36E−14 | 2.00E−36 | 3.55E−19 | 3.60E−07 | 3.09E−20 |
| 38 | 5.87E−37 | 1.44E−15 | 2.29E−13 | 2.00E−36 | 2.38E−18 | 1.01E−06 | 4.30E−21 |
| 39 | 7.97E−37 | 1.41E−20 | 4.11E−10 | 1.69E−34 | 6.22E−17 | 1.57E−12 | 9.61E−26 |
| 40 | 8.02E−36 | 1.02E−16 | 8.36E−13 | 8.02E−37 | 6.77E−18 | 2.61E−10 | 1.91E−19 |
| 41 | 1.05E−36 | 5.82E−22 | 6.09E−07 | 1.09E−33 | 3.93E−12 | 9.82E−13 | 1.13E−26 |
| 42 | 2.17E−18 | 1.05E−13 | 2.19E−05 | 7.67E−17 | 1.44E−05 | 1.58E−19 | 2.27E−36 |
| 43 | 2.04E−35 | 2.18E−16 | 4.05E−13 | 2.41E−36 | 4.89E−18 | 7.30E−10 | 2.59E−18 |
| 44 | 2.30E−34 | 4.36E−15 | 1.44E−11 | 8.19E−36 | 1.06E−16 | 9.26E−09 | 1.67E−18 |
| 45 | 8.67E−36 | 6.11E−17 | 3.23E−06 | 1.48E−32 | 1.25E−11 | 1.06E−09 | 8.79E−25 |
| 46 | 1.07E−35 | 6.07E−21 | 9.46E−09 | 3.15E−33 | 4.04E−15 | 6.09E−14 | 1.52E−24 |
| 47 | 2.15E−17 | 3.02E−13 | 2.37E−05 | 3.26E−16 | 2.56E−05 | 2.12E−19 | 1.73E−35 |
| 48 | 2.18E−35 | 2.69E−18 | 0.00016455 | 2.17E−32 | 2.13E−10 | 9.38E−10 | 2.81E−21 |
| 49 | 2.57E−35 | 5.01E−23 | 1.62E−06 | 3.27E−32 | 1.19E−11 | 4.78E−13 | 2.98E−26 |
| 50 | 2.89E−35 | 4.58E−19 | 5.87E−06 | 4.77E−32 | 5.92E−13 | 2.05E−11 | 8.30E−23 |

TABLE 2e
Data for Acinetobacter, particularly Acinetobacter baumanii (continued)

| No. | Locus.Tag | Gene.Symbol | GenBank.Accession | Chromosome |
|---|---|---|---|---|
| 1 | ABK1_1135 | | ADX02769 | |
| 2 | A60131_010100011170 | | ZP_06783174 | |
| 3 | A1S_0690 | | YP_001083736 | |
| 4 | ABBFA_001710 | | YP_002325613 | |
| 5 | ABBFA_001640 | | YP_002325543 | |
| 6 | AB57_1876 | | YP_002319238 | |
| 7 | AB57_2151 | | YP_002319507 | |
| 8 | ABBFA_001638 | | YP_002325541 | |
| 9 | AB57_2147 | | YP_002319503 | |
| 10 | AbauAB_010100009672 | | ZP_04661877 | |
| 11 | HMPREF0014_00181 | | ZP_05823167 | |
| 12 | HMPREF0014_02450 | | ZP_05825436 | |
| 13 | HMPREF0014_02452 | | ZP_05825438 | |
| 14 | AOLE_17735 | | YP_003733805 | |
| 15 | HMPREF0012_01352 | | ZP_06057184 | |
| 16 | HMPREF0014_02453 | | ZP_05825439 | |
| 17 | BDGL_001498 | ocd2 | ADY82084 | |
| 18 | HMPREF0014_02489 | | ZP_05825475 | |
| 19 | HMPREF0014_00004 | | ZP_05822990 | |
| 20 | ACIAD0370 | rbfA | YP_045140 | |
| 21 | HMPREF0014_02492 | | ZP_05825478 | |
| 22 | ABBFA_001637 | | YP_002325540 | |
| 23 | ABTW07_1894 | | ADX92323 | |
| 24 | ABBFA_000343 | | YP_002324276 | |
| 25 | AB57_2771 | | YP_002320110 | |
| 26 | AOLE_17690 | | YP_003733796 | |
| 27 | HMPREF0017_03097 | | ZP_06071176 | |
| 28 | A6013_010100003618 | | ZP_06795427 | |
| 29 | HMPREF0014_03338 | | ZP_05826324 | |
| 30 | A6014_010100015962 | | ZP_06788050 | |
| 31 | ACICU_00639 | filE | YP_001845298 | |
| 32 | HMPREF0013_02137 | | ZP_06692288 | |
| 33 | ABTW07_2865 | | ADX93289 | |
| 34 | HMPREF0016_03291 | | ZP_06064821 | |
| 35 | AB57_2131 | | YP_002319487 | |
| 36 | AB57_3624 | pilV | YP_002320921 | |
| 37 | ACICU_02614 | | YP_001847273 | |
| 38 | ABTW07_2863 | | ADX93287 | |
| 39 | AbauAB_010100013685 | | ZP_04662667 | |
| 40 | ABK1_2278 | | ADX03912 | |
| 41 | A6013_010100009420 | | ZP_06796568 | |
| 42 | HMPREF0010_03320 | | ZP_05829937 | |
| 43 | ACICU_01819 | | YP_001846478 | |
| 44 | HMP0015_1294 | | ZP_06727085 | |
| 45 | AB57_1430 | | YP_002318806 | |
| 46 | BDGL_000595 | | ADY81181 | |
| 47 | HMPREF0010_03319 | | ZP_05829936 | |
| 48 | ABBFA_001847 | | YP_002325750 | |
| 49 | HMPREF0014_00860 | | ZP_05823846 | |
| 50 | ABTW07_1891 | | ADX92320 | |

TABLE 2f
Data for Acinetobacter, particularly Acinetobacter baumanii (continued)

| No. | Start.Coord | End.Coord | Strand | Scaffold.ID |
|---|---|---|---|---|
| 1 | 1235814 | 1236425 | + | 650377914 |
| 2 | 64 | 768 | + | 647008664 |
| 3 | 821275 | 822057 | + | 640069344 |
| 4 | 1834753 | 1835667 | − | 643348583 |
| 5 | 1759838 | 1761280 | + | 643348583 |
| 6 | 1966831 | 1969149 | + | 643348581 |
| 7 | 2232790 | 2233716 | − | 643348581 |
| 8 | 1757930 | 1758571 | − | 643348583 |
| 9 | 2226774 | 2228099 | + | 643348581 |
| 10 | 63870 | 65015 | − | 645061599 |
| 11 | 195165 | 195419 | + | 647535325 |
| 12 | 27528 | 28301 | − | 647535345 |
| 13 | 31818 | 33023 | − | 647535345 |
| 14 | 3783514 | 3783789 | + | 648028017 |
| 15 | 1494626 | 1495630 | + | 646207323 |
| 16 | 33027 | 34796 | − | 647535345 |
| 17 | 1603798 | 1604811 | + | 650377930 |
| 18 | 74534 | 74893 | + | 647535345 |
| 19 | 1819 | 2325 | − | 647535325 |
| 20 | 363575 | 363976 | + | 637000277 |
| 21 | 76454 | 76681 | + | 647535345 |
| 22 | 1757594 | 1757890 | − | 643348583 |
| 23 | 2004366 | 2004983 | + | 650378014 |
| 24 | 370977 | 371978 | + | 643348583 |
| 25 | 2838051 | 2838620 | − | 643348581 |
| 26 | 3773081 | 3773467 | + | 648028017 |
| 27 | 716 | 1162 | + | 646207467 |
| 28 | 6958 | 7416 | − | 647008417 |
| 29 | 12541 | 13101 | − | 647535362 |
| 30 | 7588 | 7713 | + | 647009002 |
| 31 | 705957 | 707216 | + | 642555129 |
| 32 | 856694 | 857281 | − | 647536755 |
| 33 | 3040319 | 3041707 | − | 650378014 |
| 34 | 4553 | 4768 | − | 646207353 |
| 35 | 2213458 | 2214801 | − | 643348581 |
| 36 | 3730668 | 3731222 | − | 643348581 |
| 37 | 2775538 | 2776941 | + | 642555129 |
| 38 | 3038397 | 3039893 | − | 650378014 |
| 39 | 70983 | 71513 | − | 645061607 |
| 40 | 2403829 | 2405136 | + | 650377914 |
| 41 | 2603 | 3454 | + | 647008460 |
| 42 | 159696 | 159998 | + | 647535409 |
| 43 | 1941428 | 1942675 | + | 642555129 |
| 44 | 1088 | 2629 | − | 647018944 |
| 45 | 1505450 | 1506382 | + | 643348581 |
| 46 | 622112 | 622732 | + | 650377930 |
| 47 | 158794 | 159609 | + | 647535409 |
| 48 | 1980078 | 1981988 | − | 643348583 |
| 49 | 126664 | 127845 | + | 647535329 |
| 50 | 1999835 | 2001676 | + | 650378014 |

[0250] Examples 2 and 3: Enterobacter, particularly Enterobacter aerogenes and Enterobacter cloacae

[0251] The procedure was carried out as in Example 1, except that the following microorganisms were used:+

[0252] Bacterial Strains

[0253] The inventors selected 695 Enterobacter strains, particularly 298 for Enterobacter aerogenes and 397 for Enterobacter cloacae, from the microbiology strain collection at Siemens Healthcare Diagnostics (West Sacramento, Calif.) for susceptibility testing and whole genome sequencing.

[0254] From MetaRef, 5220 centroids of E. aerogenes were used as reference sequences for E. aerogenes, and 4734 centroids of E. cloacae were used as reference sequences for E. cloacae.

[0255] The results for Enterobacter aerogenes are shown in Tables 3 (corresponding to Table 1) and 4 (corresponding to Table 2), and the results for Enterobacter cloacae are shown in Tables 5 (corresponding to Table 1) and 6 (corresponding to Table 2).

TABLE 3a
Data for Enterobacter, particularly Enterobacter aerogenes

| | Scaffold.External. | | |
|---|---|---|---|
| No. | Accession | Scaffold.Name | best_pv |
| 1 | NC_015663 | Enterobacter aerogenes KCTC 2190 chromosome: NC_015663 | 1.01047730430126e−10 |
| 2 | NC_015663 | Enterobacter aerogenes KCTC 2190 chromosome: NC_015663 | 1.01047730430126e−10 |
| 3 | NC_015663 | Enterobacter aerogenes KCTC 2190 chromosome: NC_015663 | 2.21893843673589e−10 |
| 4 | NC_015663 | Enterobacter aerogenes KCTC 2190 chromosome: NC_015663 | 7.36056945497466e−08 |
| 5 | NC_015663 | Enterobacter aerogenes KCTC 2190 chromosome: NC_015663 | 9.81164607784395e−08 |
| 6 | NC_015663 | Enterobacter aerogenes KCTC 2190 chromosome: NC_015663 | 9.81164607784395e−08 |
| 7 | NC_015663 | Enterobacter aerogenes KCTC 2190 chromosome: NC_015663 | 3.92206261774063e−06 |
| 8 | NC_015663 | Enterobacter aerogenes KCTC 2190 chromosome: NC_015663 | 9.95623777570528e−06 |
| 9 | NC_015663 | Enterobacter aerogenes KCTC 2190 chromosome: NC_015663 | 0.000635187711382771 |
| 10 | NC_009778 | Enterobacter sakazakii ATCC BAA-894: NC_009778 | 0.000701852165838025 |
| 11 | NC_015663 | Enterobacter aerogenes KCTC 2190 chromosome: NC_015663 | 0.000717841336438945 |
| 12 | NZ_GG745509 | Klebsiella sp. 1_1_55 genomic scaffold supercont1.2: | 0.000881981942215321 |
| | | NZ_GG745509 | |
| 13 | NC_013850 | Klebsiella variicola At-22 chromosome: NC_013850 | 0.000881981942215321 |
| 14 | NC_015663 | Enterobacter aerogenes KCTC 2190 chromosome: NC_015663 | 0.000960532001115215 |
| 15 | NC_015663 | Enterobacter aerogenes KCTC 2190 chromosome: NC_015663 | 0.00108645793188005 |
| 16 | NZ_ADTJ01000031 | Escherichia coli MS 198-1 E_coli198-1-1.0_Cont45.1: | 0.00108724371491948 |
| | | NZ_ADTJ01000031 | |
| 17 | NC_015663 | Enterobacter aerogenes KCTC 2190 chromosome: NC_015663 | 0.0016524197402272 |
| 18 | NC_015663 | Enterobacter aerogenes KCTC 2190 chromosome: NC_015663 | 0.00184130315909336 |
| 19 | NC_015663 | Enterobacter aerogenes KCTC 2190 chromosome: NC_015663 | 0.00187260357604506 |
| 20 | NC_015663 | Enterobacter aerogenes KCTC 2190 chromosome: NC_015663 | 0.00191687062572367 |
| 21 | NZ_ACZD01000042 | Klebsiella pneumoniae subsp. rhinoscleromatis ATCC | 0.00208337132265191 |
| | | 13884 contig00042: NZ_ACZD01000042 | |
| 22 | NC_015663 | Enterobacter aerogenes KCTC 2190 chromosome: NC_015663 | 0.00208337132265191 |
| 23 | NZ_ADTJ01000031 | Escherichia coli MS 198-1 E_coli198-1-1.0_Cont45.1: | 0.00241352185546859 |
| | | NZ_ADTJ01000031 | |
| 24 | NZ_ADTJ01000031 | Escherichia coli MS 198-1 E_coli198-1-1.0_Cont45.1: | 0.00245969973695216 |
| | | NZ_ADTJ01000031 | |
| 25 | AM946981 | Escherichia coli BL21(DE3): AM946981 | 0.00327316953478549 |
| 26 | NC_015663 | Enterobacter aerogenes KCTC 2190 chromosome: NC_015663 | 0.00327864620009511 |
| 27 | NC_015663 | Enterobacter aerogenes KCTC 2190 chromosome: NC_015663 | 0.00334082507673483 |
| 28 | NC_015663 | Enterobacter aerogenes KCTC 2190 chromosome: NC_015663 | 0.00342044194519721 |
| 29 | NC_015663 | Enterobacter aerogenes KCTC 2190 chromosome: NC_015663 | 0.00349516820070151 |
| 30 | NC_015663 | Enterobacter aerogenes KCTC 2190 chromosome: NC_015663 | 0.00391582859992096 |
| 31 | NC_015663 | Enterobacter aerogenes KCTC 2190 chromosome: NC_015663 | 0.0039468230846432 |
| 32 | NC_015663 | Enterobacter aerogenes KCTC 2190 chromosome: NC_015663 | 0.0042274756954506 |
| 33 | NC_015663 | Enterobacter aerogenes KCTC 2190 chromosome: NC_015663 | 0.00458480687490629 |
| 34 | NC_015663 | Enterobacter aerogenes KCTC 2190 chromosome: NC_015663 | 0.00458480687490629 |
| 35 | NC_015663 | Enterobacter aerogenes KCTC 2190 chromosome: NC_015663 | 0.00458480687490629 |
| 36 | NC_012731 | Klebsiella pneumoniae NTUH-K2044: NC_012731 | 0.00458480687490629 |
| 37 | NC_015663 | Enterobacter aerogenes KCTC 2190 chromosome: NC_015663 | 0.00482300882771186 |
| 38 | NC_015663 | Enterobacter aerogenes KCTC 2190 chromosome: NC_015663 | 0.00495283743056749 |
| 39 | NC_015663 | Enterobacter aerogenes KCTC 2190 chromosome: NC_015663 | 0.00495283743056749 |
| 40 | NC_015663 | Enterobacter aerogenes KCTC 2190 chromosome: NC_015663 | 0.00503080982688659 |
| 41 | NC_015663 | Enterobacter aerogenes KCTC 2190 chromosome: NC_015663 | 0.00529748534762393 |
| 42 | NC_015663 | Enterobacter aerogenes KCTC 2190 chromosome: NC_015663 | 0.00585931541937669 |
| 43 | NC_015663 | Enterobacter aerogenes KCTC 2190 chromosome: NC_015663 | 0.00585931541937669 |
| 44 | NC_015663 | Enterobacter aerogenes KCTC 2190 chromosome: NC_015663 | 0.00585931541937669 |
| 45 | NC_015663 | Enterobacter aerogenes KCTC 2190 chromosome: NC_015663 | 0.00585931541937669 |
| 46 | NC_015663 | Enterobacter aerogenes KCTC 2190 chromosome: NC_015663 | 0.00648651344338336 |
| 47 | NC_015663 | Enterobacter aerogenes KCTC 2190 chromosome: NC_015663 | 0.00648651344338336 |
| 48 | NC_015663 | Enterobacter aerogenes KCTC 2190 chromosome: NC_015663 | 0.00648651344338336 |
| 49 | NZ_GG745510 | Klebsiella sp. 1_1_55 genomic scaffold supercont1.3: | 0.00659680763861341 |
| | | NZ_GG745510 | |
| 50 | NC_015663 | Enterobacter aerogenes KCTC 2190 chromosome: NC_015663 | 0.00667294667231188 |

TABLE 3b
Data for Enterobacter, particularly Enterobacter aerogenes (continued)

| No. | sign_phenos | sign_phenos_class | best_pheno | best_pheno_class |
|---|---|---|---|---|
| 1 | AZT; CAX; CAZ; CFT; CP; CRM; LVX; | aminoglycoside; fluoroquinolone; lactam; | CP | fluoroquinolone |
| | P/T; TO; T/S | other | | |
| 2 | AZT; CAX; CAZ; CFT; CP; CRM; | aminoglycoside; fluoroquinolone; lactam; | CP | fluoroquinolone |
| | LVX; P/T; TO; T/S | other | | |
| 3 | AZT; CAX; CAZ; CFT; CP; CRM; | aminoglycoside; fluoroquinolone; lactam; | CP | fluoroquinolone |
| | LVX; P/T; TO; T/S | other | | |
| 4 | CP; LVX; TO; T/S | aminoglycoside; fluoroquinolone; other | CP | fluoroquinolone |
| 5 | AZT; CAX; CAZ; CFT; CP; CRM; LVX; P/T; T/S | fluoroquinolone; lactam; other | CP | fluoroquinolone |
| 6 | AZT; CP; LVX; P/T; T/S | fluoroquinolone; lactam; other | CP | fluoroquinolone |
| 7 | CP; LVX; T/S | fluoroquinolone; other | CP | fluoroquinolone |
| 8 | CP; LVX; T/S | fluoroquinolone; other | CP | fluoroquinolone |
| 9 | AZT; CAX; CAZ; CFT; P/T | lactam | CFT | lactam |
| 10 | AZT; CAX; CAZ; CFT; CRM; P/T | lactam | AZT | lactam |
| 11 | CAX; CFT; CRM | lactam | CRM | lactam |
| 12 | AZT; CAX; CAZ; CFT; P/T | lactam | CAX | lactam |
| 13 | AZT; CAX; CAZ; CFT; P/T | lactam | CAX | lactam |
| 14 | TO | aminoglycoside | TO | aminoglycoside |
| 15 | AZT; CAX; CAZ; CFT; CRM; P/T | lactam | CAX | lactam |
| 16 | CP; LVX | fluoroquinolone | CP | fluoroquinolone |
| 17 | AZT; CAX; CAZ; CFT; CP; P/T | fluoroquinolone; lactam | P/T | lactam |
| 18 | AZT; CAX; CAZ; CFT; CP; P/T | fluoroquinolone; lactam | CAX | lactam |
| 19 | AZT; CAX; CAZ; CFT; CRM | lactam | CAX | lactam |
| 20 | CAX; CAZ; CFT | lactam | CAX | lactam |
| 21 | CAX; CAZ; CFT; CRM; P/T | lactam | CAX | lactam |
| 22 | CAX; CAZ; CFT; CRM; P/T | lactam | CAX | lactam |
| 23 | TO | aminoglycoside | TO | aminoglycoside |
| 24 | TO | aminoglycoside | TO | aminoglycoside |
| 25 | AZT; CAX; CAZ; CFT | lactam | CAX | lactam |
| 26 | CP | fluoroquinolone | CP | fluoroquinolone |
| 27 | AZT; CAX; CAZ; CFT; CRM; P/T | lactam | CAX | lactam |
| 28 | CAX; CAZ; CFT; CRM; P/T | lactam | CAX | lactam |
| 29 | AZT; CAX; CAZ; CFT | lactam | CAX | lactam |
| 30 | AZT; CAX; CAZ; CFT; P/T | lactam | AZT | lactam |
| 31 | AZT; CAX; CFT | lactam | CAX | lactam |
| 32 | AZT; CAX | lactam | CAX | lactam |
| 33 | CAX; CFT | lactam | CAX | lactam |
| 34 | CAX; CFT | lactam | CAX | lactam |
| 35 | CAX; CP | fluoroquinolone; lactam | CP | fluoroquinolone |
| 36 | CAX; CFT | lactam | CAX | lactam |
| 37 | CAX; CFT; CRM; P/T | lactam | CRM | lactam |
| 38 | AZT; CAX; CFT | lactam | CFT | lactam |
| 39 | AZT; CAX; CFT | lactam | CFT | lactam |
| 40 | CAX | lactam | CAX | lactam |
| 41 | CAX | lactam | CAX | lactam |
| 42 | AZT; CAX | lactam | AZT | lactam |
| 43 | CAX | lactam | CAX | lactam |
| 44 | AZT; CAX | lactam | AZT | lactam |
| 45 | AZT; CAX; CFT | lactam | CAX | lactam |
| 46 | AZT; CAX | lactam | CAX | lactam |
| 47 | AZT; CAX | lactam | CAX | lactam |
| 48 | AZT; CAX | lactam | CAX | lactam |
| 49 | CAX | lactam | CAX | lactam |
| 50 | CAX | lactam | CAX | lactam |

TABLE 3c
Data for Enterobacter, particularly Enterobacter aerogenes (continued)

| No. | num_aminoglycoside | num_fluoroquinolone | num_lactam | num_other |
|---|---|---|---|---|
| 1 | 1 | 2 | 6 | 1 |
| 2 | 1 | 2 | 6 | 1 |
| 3 | 1 | 2 | 6 | 1 |
| 4 | 1 | 2 | 0 | 1 |
| 5 | 0 | 2 | 6 | 1 |
| 6 | 0 | 2 | 2 | 1 |
| 7 | 0 | 2 | 0 | 1 |
| 8 | 0 | 2 | 0 | 1 |
| 9 | 0 | 0 | 5 | 0 |
| 10 | 0 | 0 | 6 | 0 |
| 11 | 0 | 0 | 3 | 0 |
| 12 | 0 | 0 | 5 | 0 |
| 13 | 0 | 0 | 5 | 0 |
| 14 | 1 | 0 | 0 | 0 |
| 15 | 0 | 0 | 6 | 0 |
| 16 | 0 | 2 | 0 | 0 |
| 17 | 0 | 1 | 5 | 0 |
| 18 | 0 | 1 | 5 | 0 |
| 19 | 0 | 0 | 5 | 0 |
| 20 | 0 | 0 | 3 | 0 |
| 21 | 0 | 0 | 5 | 0 |
| 22 | 0 | 0 | 5 | 0 |
| 23 | 1 | 0 | 0 | 0 |
| 24 | 1 | 0 | 0 | 0 |
| 25 | 0 | 0 | 4 | 0 |
| 26 | 0 | 1 | 0 | 0 |
| 27 | 0 | 0 | 6 | 0 |
| 28 | 0 | 0 | 5 | 0 |
| 29 | 0 | 0 | 4 | 0 |
| 30 | 0 | 0 | 5 | 0 |
| 31 | 0 | 0 | 3 | 0 |
| 32 | 0 | 0 | 2 | 0 |
| 33 | 0 | 0 | 2 | 0 |
| 34 | 0 | 0 | 2 | 0 |
| 35 | 0 | 1 | 1 | 0 |
| 36 | 0 | 0 | 2 | 0 |
| 37 | 0 | 0 | 4 | 0 |
| 38 | 0 | 0 | 3 | 0 |
| 39 | 0 | 0 | 3 | 0 |
| 40 | 0 | 0 | 1 | 0 |
| 41 | 0 | 0 | 1 | 0 |
| 42 | 0 | 0 | 2 | 0 |
| 43 | 0 | 0 | 1 | 0 |
| 44 | 0 | 0 | 2 | 0 |
| 45 | 0 | 0 | 3 | 0 |
| 46 | 0 | 0 | 2 | 0 |
| 47 | 0 | 0 | 2 | 0 |
| 48 | 0 | 0 | 2 | 0 |
| 49 | 0 | 0 | 1 | 0 |
| 50 | 0 | 0 | 1 | 0 |

TABLE 3d
Data for Enterobacter, particularly Enterobacter aerogenes (continued)

| No. | AZT_pv_adj | CAX_pv_adj | CAZ_pv_adj | CFT_pv_adj | CP_pv_adj |
|---|---|---|---|---|---|
| 1 | 8.22E−04 | 2.45E−04 | 3.83E−04 | 4.31E−04 | 1.01E−10 |
| 2 | 1.32E−03 | 4.48E−04 | 7.06E−04 | 7.76E−04 | 1.01E−10 |
| 3 | 3.27E−03 | 1.99E−03 | 4.43E−03 | 3.01E−03 | 2.22E−10 |
| 4 | 2.06E−02 | 1.86E−02 | 2.29E−02 | 2.41E−02 | 7.36E−08 |
| 5 | 4.29E−03 | 2.32E−04 | 6.91E−04 | 7.06E−04 | 9.81E−08 |
| 6 | 8.86E−03 | 1.82E−02 | 1.77E−02 | 1.84E−02 | 9.81E−08 |
| 7 | 5.47E−01 | 1.61E−02 | 4.75E−02 | 4.90E−02 | 3.92E−06 |
| 8 | 6.96E−01 | 3.29E−02 | 9.63E−02 | 9.80E−02 | 9.96E−06 |
| 9 | 4.82E−03 | 9.01E−04 | 1.84E−03 | 6.35E−04 | 3.94E−02 |
| 10 | 7.02E−04 | 3.95E−03 | 6.47E−03 | 6.18E−03 | 2.19E−02 |
| 11 | 1.74E−02 | 4.82E−03 | 1.41E−02 | 4.93E−03 | 4.78E−01 |
| 12 | 5.48E−03 | 8.82E−04 | 6.43E−03 | 2.81E−03 | 2.06E−01 |
| 13 | 5.48E−03 | 8.82E−04 | 6.43E−03 | 2.81E−03 | 2.06E−01 |
| 14 | 6.13E−01 | 3.30E−01 | 3.24E−01 | 4.36E−01 | 1.68E−02 |
| 15 | 3.27E−03 | 1.09E−03 | 2.08E−03 | 3.16E−03 | 1.86E−02 |
| 16 | 1.54E−01 | 7.15E−02 | 8.90E−02 | 1.12E−01 | 1.09E−03 |
| 17 | 3.27E−03 | 5.44E−03 | 6.66E−03 | 5.44E−03 | 6.21E−03 |
| 18 | 5.86E−03 | 1.84E−03 | 2.44E−03 | 3.43E−03 | 5.30E−03 |
| 19 | 2.04E−03 | 1.87E−03 | 6.34E−03 | 2.86E−03 | 4.83E−01 |
| 20 | 2.06E−02 | 1.92E−03 | 6.18E−03 | 3.56E−03 | 1.74E−01 |
| 21 | 2.06E−02 | 2.08E−03 | 6.49E−03 | 5.34E−03 | 4.77E−01 |
| 22 | 2.06E−02 | 2.08E−03 | 6.49E−03 | 5.34E−03 | 4.77E−01 |
| 23 | 3.45E−01 | 2.11E−01 | 2.09E−01 | 2.56E−01 | 4.61E−02 |
| 24 | 2.34E−01 | 1.31E−01 | 1.03E−01 | 1.64E−01 | 1.86E−02 |
| 25 | 3.92E−03 | 3.27E−03 | 9.44E−03 | 4.58E−03 | 6.15E−01 |
| 26 | 1.66E−02 | 3.39E−02 | 3.18E−02 | 4.22E−02 | 3.28E−03 |
| 27 | 3.46E−03 | 3.34E−03 | 5.74E−03 | 5.48E−03 | 2.58E−01 |
| 28 | 1.26E−02 | 3.42E−03 | 6.74E−03 | 5.59E−03 | 6.42E−02 |
| 29 | 5.74E−03 | 3.50E−03 | 9.56E−03 | 4.82E−03 | 4.25E−01 |
| 30 | 3.92E−03 | 5.86E−03 | 9.75E−03 | 7.85E−03 | 4.70E−01 |
| 31 | 5.99E−03 | 3.95E−03 | 1.08E−02 | 5.34E−03 | 5.16E−01 |
| 32 | 8.78E−03 | 4.23E−03 | 2.75E−02 | 1.06E−02 | 3.44E−01 |
| 33 | 2.32E−02 | 4.58E−03 | 2.06E−02 | 9.82E−03 | 6.54E−01 |
| 34 | 2.32E−02 | 4.58E−03 | 2.06E−02 | 9.82E−03 | 6.54E−01 |
| 35 | 2.01E−02 | 5.71E−03 | 1.85E−02 | 1.46E−02 | 4.58E−03 |
| 36 | 2.32E−02 | 4.58E−03 | 2.06E−02 | 9.82E−03 | 6.54E−01 |
| 37 | 3.09E−02 | 6.66E−03 | 2.19E−02 | 9.73E−03 | 4.29E−01 |
| 38 | 9.88E−03 | 8.78E−03 | 1.16E−02 | 4.95E−03 | 1.65E−01 |
| 39 | 9.88E−03 | 8.78E−03 | 1.16E−02 | 4.95E−03 | 1.65E−01 |
| 40 | 3.62E−02 | 5.03E−03 | 2.31E−02 | 1.38E−02 | 2.47E−01 |
| 41 | 1.54E−02 | 5.30E−03 | 1.43E−02 | 1.12E−02 | 6.43E−02 |
| 42 | 5.86E−03 | 9.44E−03 | 1.23E−02 | 2.06E−02 | 7.63E−02 |
| 43 | 1.15E−02 | 5.86E−03 | 1.39E−02 | 1.38E−02 | 2.62E−01 |
| 44 | 5.86E−03 | 9.44E−03 | 1.23E−02 | 2.06E−02 | 7.63E−02 |
| 45 | 9.73E−03 | 5.86E−03 | 1.64E−02 | 6.17E−03 | 4.25E−01 |
| 46 | 7.89E−03 | 6.49E−03 | 3.09E−02 | 1.64E−02 | 2.98E−01 |
| 47 | 7.89E−03 | 6.49E−03 | 3.09E−02 | 1.64E−02 | 2.98E−01 |
| 48 | 7.89E−03 | 6.49E−03 | 3.09E−02 | 1.64E−02 | 2.98E−01 |
| 49 | 1.20E−02 | 6.60E−03 | 1.12E−02 | 1.82E−02 | 2.16E−01 |
| 50 | 1.38E−02 | 6.67E−03 | 2.06E−02 | 1.64E−02 | 3.23E−01 |

TABLE 3e
Data for Enterobacter, particularly Enterobacter aerogenes (continued)

| No. | CRM_pv_adj | LVX_pv_adj | P/T_pv_adj | TO_pv_adj | T/S_pv_adj |
|---|---|---|---|---|---|
| 1 | 4.55E−04 | 5.22E−07 | 2.23E−04 | 2.03E−04 | 1.88E−06 |
| 2 | 8.93E−04 | 7.25E−07 | 2.87E−04 | 2.45E−04 | 2.53E−06 |
| 3 | 1.47E−03 | 8.82E−07 | 4.54E−03 | 2.55E−04 | 3.69E−06 |
| 4 | 1.86E−02 | 5.08E−05 | 2.73E−02 | 3.92E−03 | 3.62E−05 |
| 5 | 9.61E−04 | 7.96E−07 | 9.64E−04 | 1.26E−02 | 1.69E−03 |
| 6 | 1.46E−02 | 1.31E−04 | 8.95E−03 | 2.06E−02 | 8.55E−03 |
| 7 | 4.85E−02 | 6.35E−04 | 2.98E−01 | 9.28E−02 | 9.01E−04 |
| 8 | 1.03E−01 | 9.82E−04 | 4.28E−01 | 1.13E−01 | 1.44E−03 |
| 9 | 1.08E−02 | 2.67E−01 | 3.56E−03 | 5.09E−01 | 2.87E−01 |
| 10 | 1.66E−03 | 1.39E−01 | 5.16E−03 | 8.93E−02 | 1.08E−01 |
| 11 | 7.18E−04 | 5.91E−01 | 1.76E−02 | 7.39E−01 | 9.14E−01 |
| 12 | 7.03E−02 | 6.77E−01 | 6.85E−03 | 7.65E−01 | 9.68E−01 |
| 13 | 7.03E−02 | 6.77E−01 | 6.85E−03 | 7.65E−01 | 9.68E−01 |
| 14 | 8.23E−01 | 8.17E−02 | 2.13E−01 | 9.61E−04 | 2.24E−02 |
| 15 | 4.37E−03 | 2.22E−01 | 9.03E−03 | 2.02E−01 | 2.91E−01 |
| 16 | 4.57E−02 | 7.49E−03 | 2.26E−01 | 4.29E−01 | 4.38E−02 |
| 17 | 3.26E−02 | 1.15E−01 | 1.65E−03 | 1.93E−02 | 4.43E−02 |
| 18 | 1.64E−02 | 1.66E−01 | 9.73E−03 | 4.25E−01 | 6.31E−01 |
| 19 | 3.50E−03 | 6.96E−01 | 3.47E−02 | 1 | 1 |
| 20 | 1.20E−02 | 4.90E−01 | 1.60E−02 | 1 | 7.91E−01 |
| 21 | 2.40E−03 | 9.70E−01 | 9.40E−03 | 4.93E−01 | 6.15E−01 |
| 22 | 2.40E−03 | 9.70E−01 | 9.40E−03 | 4.93E−01 | 6.15E−01 |
| 23 | 5.50E−01 | 2.07E−01 | 1.23E−01 | 2.41E−03 | 4.88E−02 |
| 24 | 5.46E−01 | 9.58E−02 | 1.16E−01 | 2.46E−03 | 7.04E−02 |
| 25 | 1.40E−02 | 8.28E−01 | 4.99E−02 | 9.45E−01 | 8.28E−01 |
| 26 | 4.65E−02 | 5.56E−02 | 1.64E−02 | 4.80E−02 | 1.26E−02 |
| 27 | 9.73E−03 | 5.14E−01 | 9.59E−03 | 7.93E−01 | 8.06E−01 |
| 28 | 5.86E−03 | 3.56E−01 | 4.54E−03 | 3.41E−01 | 5.47E−01 |
| 29 | 2.85E−02 | 7.23E−01 | 6.42E−02 | 8.28E−01 | 6.13E−01 |
| 30 | 1.82E−02 | 6.97E−01 | 5.99E−03 | 6.87E−01 | 9.71E−01 |
| 31 | 1.59E−02 | 8.28E−01 | 7.52E−02 | 8.28E−01 | 7.23E−01 |
| 32 | 1.61E−02 | 6.13E−01 | 9.20E−02 | 9.51E−01 | 8.47E−01 |
| 33 | 8.16E−02 | 9.71E−01 | 3.93E−02 | 3.34E−01 | 7.11E−01 |
| 34 | 8.16E−02 | 9.71E−01 | 3.93E−02 | 3.34E−01 | 7.11E−01 |
| 35 | 5.70E−02 | 3.62E−02 | 1.61E−02 | 1.47E−01 | 4.48E−02 |
| 36 | 8.16E−02 | 9.71E−01 | 3.93E−02 | 3.34E−01 | 7.11E−01 |
| 37 | 4.82E−03 | 3.59E−01 | 5.54E−03 | 7.80E−01 | 2.77E−01 |
| 38 | 1.33E−02 | 4.16E−01 | 4.96E−02 | 7.39E−01 | 5.42E−01 |
| 39 | 1.33E−02 | 4.16E−01 | 4.96E−02 | 7.39E−01 | 5.42E−01 |
| 40 | 1.95E−02 | 5.02E−01 | 5.98E−02 | 2.35E−01 | 2.07E−01 |
| 41 | 4.20E−02 | 2.18E−01 | 1.19E−02 | 2.02E−01 | 4.53E−01 |
| 42 | 7.24E−02 | 4.76E−01 | 1.76E−02 | 9.62E−01 | 7.80E−01 |
| 43 | 6.56E−02 | 5.59E−01 | 9.19E−02 | 8.66E−01 | 1 |
| 44 | 7.24E−02 | 4.76E−01 | 1.76E−02 | 9.62E−01 | 7.80E−01 |
| 45 | 1.76E−02 | 7.23E−01 | 1.10E−01 | 8.28E−01 | 7.24E−01 |
| 46 | 1.84E−02 | 6.37E−01 | 9.12E−02 | 7.39E−01 | 1 |
| 47 | 1.84E−02 | 6.37E−01 | 9.12E−02 | 7.39E−01 | 1 |
| 48 | 1.84E−02 | 6.37E−01 | 9.12E−02 | 7.39E−01 | 1 |
| 49 | 7.35E−02 | 7.11E−01 | 1.15E−02 | 5.12E−01 | 3.68E−01 |
| 50 | 1.28E−01 | 6.61E−01 | 1.11E−01 | 9.60E−01 | 1 |

TABLE 3f
Data for Enterobacter, particularly Enterobacter aerogenes (continued)

| No. | Locus.Tag | Gene.Symbol | GenBank.Accession | Chromosome |
|---|---|---|---|---|
| 1 | EAE_18905 | | YP_004593967 | |
| 2 | EAE_18910 | | YP_004593968 | |
| 3 | EAE_20750 | | YP_004594334 | |
| 4 | EAE_20680 | | YP_004594322 | |
| 5 | EAE_10325 | | YP_004592260 | |
| 6 | EAE_15945 | | YP_004593379 | |
| 7 | EAE_24270 | | YP_004595026 | |
| 8 | EAE_19175 | | YP_004594021 | |
| 9 | EAE_17360 | | YP_004593662 | |
| 10 | ESA_03685 | | YP_001439725 | |
| 11 | EAE_20530 | tynA | YP_004594292 | |
| 12 | HMPREF0485_02019 | | ZP_06549619 | |
| 13 | Kvar_3843 | | YP_003440755 | |
| 14 | EAE_19000 | | YP_004593986 | |
| 15 | EAE_21240 | | YP_004594432 | |
| 16 | HMPREF9552_00257 | | ZP_07114469 | |
| 17 | EAE_11550 | | YP_004592503 | |
| 18 | EAE_21235 | | YP_004594431 | |
| 19 | EAE_24605 | flk | YP_004595093 | |
| 20 | EAE_17355 | | YP_004593661 | |
| 21 | HMPREF0484_0684 | | ZP_06013668 | |
| 22 | EAE_06855 | | YP_004591574 | |
| 23 | HMPREF9552_00255 | | ZP_07114467 | |
| 24 | HMPREF9552_00247 | | ZP_07114459 | |
| 25 | B21_02377 | ybl112 | CAQ32894 | |
| 26 | EAE_00560 | | YP_004590329 | |
| 27 | EAE_02625 | aphA | YP_004590739 | |
| 28 | EAE_10300 | | YP_004592255 | |
| 29 | EAE_23410 | | YP_004594860 | |
| 30 | EAE_02640 | | YP_004590742 | |
| 31 | EAE_23150 | | YP_004594808 | |
| 32 | EAE_23330 | | YP_004594844 | |
| 33 | EAE_06345 | | YP_004591472 | |
| 34 | EAE_06340 | | YP_004591471 | |
| 35 | EAE_23435 | | YP_004594865 | |
| 36 | KP1_5319 | wabN | YP_002921814 | |
| 37 | EAE_22395 | | YP_004594657 | |
| 38 | EAE_06770 | | YP_004591557 | |
| 39 | EAE_06775 | | YP_004591558 | |
| 40 | EAE_06430 | ligB | YP_004591489 | |
| 41 | EAE_15075 | | YP_004593207 | |
| 42 | EAE_03420 | | YP_004590898 | |
| 43 | EAE_23445 | | YP_004594867 | |
| 44 | EAE_03430 | | YP_004590900 | |
| 45 | EAE_23415 | | YP_004594861 | |
| 46 | EAE_06330 | | YP_004591469 | |
| 47 | EAE_06320 | | YP_004591467 | |
| 48 | EAE_06325 | | YP_004591468 | |
| 49 | HMPREF0485_03181 | | ZP_06550780 | |
| 50 | EAE_23450 | | YP_004594868 | |

TABLE 3g
Data for Enterobacter, particularly Enterobacter aerogenes (continued)

| No. | Start.Coord | End.Coord | Strand | Scaffold.ID |
|---|---|---|---|---|
| 1 | 4057377 | 4057994 | − | 650716122 |
| 2 | 4057994 | 4059313 | − | 650716122 |
| 3 | 4444576 | 4447206 | − | 650716122 |
| 4 | 4432502 | 4433842 | − | 650716122 |
| 5 | 2202535 | 2203893 | − | 650716122 |
| 6 | 3439556 | 3442066 | + | 650716122 |
| 7 | 5174177 | 5175436 | + | 650716122 |
| 8 | 4113374 | 4114306 | − | 650716122 |
| 9 | 3748049 | 3748279 | + | 650716122 |
| 10 | 3623778 | 3624146 | + | 640753067 |
| 11 | 4396852 | 4399119 | + | 650716122 |
| 12 | 347124 | 347486 | + | 647536390 |
| 13 | 4046094 | 4046396 | − | 646312028 |
| 14 | 4078519 | 4079427 | + | 650716122 |
| 15 | 4545796 | 4546983 | − | 650716122 |
| 16 | 14233 | 15036 | + | 648286894 |
| 17 | 2477524 | 2479728 | + | 650716122 |
| 18 | 4544187 | 4545296 | + | 650716122 |
| 19 | 5241493 | 5242410 | + | 650716122 |
| 20 | 3747138 | 3747791 | + | 650716122 |
| 21 | 5606 | 5998 | + | 647009789 |
| 22 | 1421376 | 1421699 | + | 650716122 |
| 23 | 12357 | 13376 | + | 648286894 |
| 24 | 7786 | 8685 | − | 648286894 |
| 25 | 2517630 | 2518469 | + | 646862300 |
| 26 | 114571 | 115482 | + | 650716122 |
| 27 | 557964 | 558680 | − | 650716122 |
| 28 | 2197515 | 2198873 | + | 650716122 |
| 29 | 4974131 | 4974946 | − | 650716122 |
| 30 | 560166 | 561344 | − | 650716122 |
| 31 | 4919559 | 4920611 | + | 650716122 |
| 32 | 4955309 | 4956457 | + | 650716122 |
| 33 | 1317545 | 1318672 | + | 650716122 |
| 34 | 1316472 | 1317548 | + | 650716122 |
| 35 | 4979540 | 4980544 | + | 650716122 |
| 36 | 5064271 | 5065293 | − | 646564530 |
| 37 | 4777378 | 4777638 | − | 650716122 |
| 38 | 1404935 | 1406026 | − | 650716122 |
| 39 | 1406073 | 1406483 | + | 650716122 |
| 40 | 1331758 | 1333431 | − | 650716122 |
| 41 | 3235642 | 3239709 | + | 650716122 |
| 42 | 718097 | 718942 | − | 650716122 |
| 43 | 4982582 | 4983136 | − | 650716122 |
| 44 | 720009 | 720686 | + | 650716122 |
| 45 | 4975309 | 4976445 | − | 650716122 |
| 46 | 1314302 | 1315078 | − | 650716122 |
| 47 | 1312221 | 1313129 | + | 650716122 |
| 48 | 1313194 | 1314276 | + | 650716122 |
| 49 | 538177 | 539649 | + | 647536391 |
| 50 | 4983148 | 4984038 | − | 650716122 |

TABLE 4a
Data for Enterobacter, particularly Enterobacter aerogenes

| | Scaffold.External. | | |
|---|---|---|---|
| No. | Accession | Scaffold.Name | best_pv |
| 1 | NC_015663 | Enterobacter aerogenes KCTC 2190 chromosome: NC_015663 | 1.01047730430126e−10 |
| 2 | NC_015663 | Enterobacter aerogenes KCTC 2190 chromosome: NC_015663 | 1.01047730430126e−10 |
| 3 | NC_015663 | Enterobacter aerogenes KCTC 2190 chromosome: NC_015663 | 2.21893843673589e−10 |
| 4 | NC_015663 | Enterobacter aerogenes KCTC 2190 chromosome: NC_015663 | 7.36056945497466e−08 |
| 5 | NC_015663 | Enterobacter aerogenes KCTC 2190 chromosome: NC_015663 | 9.81164607784395e−08 |
| 6 | NC_015663 | Enterobacter aerogenes KCTC 2190 chromosome: NC_015663 | 9.81164607784395e−08 |
| 7 | NC_015663 | Enterobacter aerogenes KCTC 2190 chromosome: NC_015663 | 3.92206261774063e−06 |
| 8 | NC_015663 | Enterobacter aerogenes KCTC 2190 chromosome: NC_015663 | 9.95623777570528e−06 |
| 9 | NC_009778 | Enterobacter sakazakii ATCC BAA-894: NC_009778 | 0.000701852165838025 |
| 10 | NC_015663 | Enterobacter aerogenes KCTC 2190 chromosome: NC_015663 | 0.000960532001115215 |
| 11 | NC_015663 | Enterobacter aerogenes KCTC 2190 chromosome: NC_015663 | 0.00108645793188005 |
| 12 | NZ_ADTJ01000031 | Escherichia coli MS 198-1 E_coli198-1-1.0_Cont45.1: | 0.00108724371491948 |
| | | NZ_ADTJ01000031 | |
| 13 | NZ_ADTJ01000031 | Escherichia coli MS 198-1 E_coli198-1-1.0_Cont45.1: | 0.00241352185546859 |
| | | NZ_ADTJ01000031 | |
| 14 | NZ_ADTJ01000031 | Escherichia coli MS 198-1 E_coli198-1-1.0_Cont45.1: | 0.00245969973695216 |
| | | NZ_ADTJ01000031 | |
| 15 | NC_015663 | Enterobacter aerogenes KCTC 2190 chromosome: NC_015663 | 0.00334082507673483 |
| 16 | NC_015663 | Enterobacter aerogenes KCTC 2190 chromosome: NC_015663 | 0.00795925223735345 |

TABLE 4b
Data for Enterobacter, particularly Enterobacter aerogenes (continued)

| No. | sign_phenos | sign_phenos_class | best_pheno | best_pheno_class |
|---|---|---|---|---|
| 1 | AZT; CAX; CAZ; CFT; CP; CRM; LVX; P/T; TO; T/S | aminoglycoside; fluoroquinolone; lactam; | CP | fluoroquinolone |
| | | other | | |
| 2 | AZT; CAX; CAZ; CFT; CP; CRM; LVX; P/T; TO; T/S | aminoglycoside; fluoroquinolone; lactam; | CP | fluoroquinolone |
| | | other | | |
| 3 | AZT; CAX; CAZ; CFT; CP; CRM; LVX; P/T; TO; T/S | aminoglycoside; fluoroquinolone; lactam; | CP | fluoroquinolone |
| | | other | | |
| 4 | CP; LVX; TO; T/S | aminoglycoside; fluoroquinolone; other | CP | fluoroquinolone |
| 5 | AZT; CAX; CAZ; CFT; CP; CRM; LVX; P/T; T/S | fluoroquinolone; lactam; other | CP | fluoroquinolone |
| 6 | AZT; CP; LVX; P/T; T/S | fluoroquinolone; lactam; other | CP | fluoroquinolone |
| 7 | CP; LVX; T/S | fluoroquinolone; other | CP | fluoroquinolone |
| 8 | CP; LVX; T/S | fluoroquinolone; other | CP | fluoroquinolone |
| 9 | AZT; CAX; CAZ; CFT; CRM; P/T | lactam | AZT | lactam |
| 10 | TO | aminoglycoside | TO | aminoglycoside |
| 11 | AZT; CAX; CAZ; CFT; CRM; P/T | lactam | CAX | lactam |
| 12 | CP; LVX | fluoroquinolone | CP | fluoroquinolone |
| 13 | TO | aminoglycoside | TO | aminoglycoside |
| 14 | TO | aminoglycoside | TO | aminoglycoside |
| 15 | AZT; CAX; CAZ; CFT; CRM; P/T | lactam | CAX | lactam |
| 16 | TO | aminoglycoside | TO | aminoglycoside |

TABLE 4c
Data for Enterobacter, particularly Enterobacter aerogenes (continued)

| No. | num_aminoglycoside | num_fluoroquinolone | num_lactam | num_other |
|---|---|---|---|---|
| 1 | 1 | 2 | 6 | 1 |
| 2 | 1 | 2 | 6 | 1 |
| 3 | 1 | 2 | 6 | 1 |
| 4 | 1 | 2 | 0 | 1 |
| 5 | 0 | 2 | 6 | 1 |
| 6 | 0 | 2 | 2 | 1 |
| 7 | 0 | 2 | 0 | 1 |
| 8 | 0 | 2 | 0 | 1 |
| 9 | 0 | 0 | 6 | 0 |
| 10 | 1 | 0 | 0 | 0 |
| 11 | 0 | 0 | 6 | 0 |
| 12 | 0 | 2 | 0 | 0 |
| 13 | 1 | 0 | 0 | 0 |
| 14 | 1 | 0 | 0 | 0 |
| 15 | 0 | 0 | 6 | 0 |
| 16 | 1 | 0 | 0 | 0 |

TABLE 4d
Data for Enterobacter, particularly Enterobacter aerogenes (continued)

| No. | AZT_pv_adj | CAX_pv_adj | CAZ_pv_adj | CFT_pv_adj | CP_pv_adj |
|---|---|---|---|---|---|
| 1 | 8.22E−04 | 2.45E−04 | 3.83E−04 | 4.31E−04 | 1.01E−10 |
| 2 | 1.32E−03 | 4.48E−04 | 7.06E−04 | 7.76E−04 | 1.01E−10 |
| 3 | 3.27E−03 | 1.99E−03 | 4.43E−03 | 3.01E−03 | 2.22E−10 |
| 4 | 2.06E−02 | 1.86E−02 | 2.29E−02 | 2.41E−02 | 7.36E−08 |
| 5 | 4.29E−03 | 2.32E−04 | 6.91E−04 | 7.06E−04 | 9.81E−08 |
| 6 | 8.86E−03 | 1.82E−02 | 1.77E−02 | 1.84E−02 | 9.81E−08 |
| 7 | 5.47E−01 | 1.61E−02 | 4.75E−02 | 4.90E−02 | 3.92E−06 |
| 8 | 6.96E−01 | 3.29E−02 | 9.63E−02 | 9.80E−02 | 9.96E−06 |
| 9 | 7.02E−04 | 3.95E−03 | 6.47E−03 | 6.18E−03 | 2.19E−02 |
| 10 | 6.13E−01 | 3.30E−01 | 3.24E−01 | 4.36E−01 | 1.68E−02 |
| 11 | 3.27E−03 | 1.09E−03 | 2.08E−03 | 3.16E−03 | 1.86E−02 |
| 12 | 1.54E−01 | 7.15E−02 | 8.90E−02 | 1.12E−01 | 1.09E−03 |
| 13 | 3.45E−01 | 2.11E−01 | 2.09E−01 | 2.56E−01 | 4.61E−02 |
| 14 | 2.34E−01 | 1.31E−01 | 1.03E−01 | 1.64E−01 | 1.86E−02 |
| 15 | 3.46E−03 | 3.34E−03 | 5.74E−03 | 5.48E−03 | 2.58E−01 |
| 16 | 3.30E−01 | 2.07E−01 | 1.34E−01 | 1.68E−01 | 8.94E−01 |

TABLE 4e
Data for Enterobacter, particularly Enterobacter aerogenes (continued)

| No. | CRM_pv_adj | LVX_pv_adj | P/T_pv_adj | TO_pv_adj | T/S_pv_adj |
|---|---|---|---|---|---|
| 1 | 4.55E−04 | 5.22E−07 | 2.23E−04 | 2.03E−04 | 1.88E−06 |
| 2 | 8.93E−04 | 7.25E−07 | 2.87E−04 | 2.45E−04 | 2.53E−06 |
| 3 | 1.47E−03 | 8.82E−07 | 4.54E−03 | 2.55E−04 | 3.69E−06 |
| 4 | 1.86E−02 | 5.08E−05 | 2.73E−02 | 3.92E−03 | 3.62E−05 |
| 5 | 9.61E−04 | 7.96E−07 | 9.64E−04 | 1.26E−02 | 1.69E−03 |
| 6 | 1.46E−02 | 1.31E−04 | 8.95E−03 | 2.06E−02 | 8.55E−03 |
| 7 | 4.85E−02 | 6.35E−04 | 2.98E−01 | 9.28E−02 | 9.01E−04 |
| 8 | 1.03E−01 | 9.82E−04 | 4.28E−01 | 1.13E−01 | 1.44E−03 |
| 9 | 1.66E−03 | 1.39E−01 | 5.16E−03 | 8.93E−02 | 1.08E−01 |
| 10 | 8.23E−01 | 8.17E−02 | 2.13E−01 | 9.61E−04 | 2.24E−02 |
| 11 | 4.37E−03 | 2.22E−01 | 9.03E−03 | 2.02E−01 | 2.91E−01 |
| 12 | 4.57E−02 | 7.49E−03 | 2.26E−01 | 4.29E−01 | 4.38E−02 |
| 13 | 5.50E−01 | 2.07E−01 | 1.23E−01 | 2.41E−03 | 4.88E−02 |
| 14 | 5.46E−01 | 9.58E−02 | 1.16E−01 | 2.46E−03 | 7.04E−02 |
| 15 | 9.73E−03 | 5.14E−01 | 9.59E−03 | 7.93E−01 | 8.06E−01 |
| 16 | 8.88E−01 | 8.87E−01 | 4.35E−02 | 7.96E−03 | 8.87E−01 |

TABLE 4f
Data for Enterobacter, particularly Enterobacter aerogenes (continued)

| | | | | |
|---|---|---|---|---|
| No. | Locus.Tag | Gene.Symbol | GenBank.Accession | Chromosome |

| | | | |
|---|---|---|---|
| 1 | EAE_18905 | | YP_004593967 |
| 2 | EAE_18910 | | YP_004593968 |
| 3 | EAE_20750 | | YP_004594334 |
| 4 | EAE_20680 | | YP_004594322 |
| 5 | EAE_10325 | | YP_004592260 |
| 6 | EAE_15945 | | YP_004593379 |
| 7 | EAE_24270 | | YP_004595026 |
| 8 | EAE_19175 | | YP_004594021 |
| 9 | ESA_03685 | | YP_001439725 |
| 10 | EAE_19000 | | YP_004593986 |
| 11 | EAE_21240 | | YP_004594432 |
| 12 | HMPREF9552_00257 | | ZP_07114469 |
| 13 | HMPREF9552_00255 | | ZP_07114467 |
| 14 | HMPREF9552_00247 | | ZP_07114459 |
| 15 | EAE_02625 | aphA | YP_004590739 |
| 16 | EAE_18950 | | YP_004593976 |

TABLE 4g
Data for Enterobacter, particularly
Enterobacter aerogenes (continued)

| No. | Start.Coord | End.Coord | Strand | Scaffold.ID |
|---|---|---|---|---|
| 1 | 4057377 | 4057994 | − | 650716122 |
| 2 | 4057994 | 4059313 | − | 650716122 |
| 3 | 4444576 | 4447206 | − | 650716122 |
| 4 | 4432502 | 4433842 | − | 650716122 |
| 5 | 2202535 | 2203893 | − | 650716122 |
| 6 | 3439556 | 3442066 | + | 650716122 |
| 7 | 5174177 | 5175436 | + | 650716122 |
| 8 | 4113374 | 4114306 | − | 650716122 |
| 9 | 3623778 | 3624146 | + | 640753067 |
| 10 | 4078519 | 4079427 | + | 650716122 |
| 11 | 4545796 | 4546983 | − | 650716122 |
| 12 | 14233 | 15036 | + | 648286894 |
| 13 | 12357 | 13376 | + | 648286894 |
| 14 | 7786 | 8685 | − | 648286894 |
| 15 | 557964 | 558680 | − | 650716122 |
| 16 | 4069127 | 4070251 | − | 650716122 |

TABLE 5a
Data for Enterobacter, particularly Enterobacter cloacae

| | Scaffold.External. | | |
|---|---|---|---|
| No. | Accession | Scaffold.Name | best_pv |
| 1 | NC_013509 | Edwardsiella tarda EIB202 plasmid pEIB202: NC_013509 | 5.49490970435242e−27 |
| 2 | NC_014107 | Enterobacter cloacae subsp. cloacae ATCC 13047 plasmid | 5.83313344212793e−25 |
| | | pECL_A: NC_014107 | |
| 3 | NC_009838 | Escherichia coli APEC O1 plasmid pAPEC-O1-R: NC_009838 | 5.83313344212793e−25 |
| 4 | NC_009838 | Escherichia coli APEC O1 plasmid pAPEC-O1-R: NC_009838 | 5.83313344212793e−25 |
| 5 | NC_014107 | Enterobacter cloacae subsp. cloacae ATCC 13047 plasmid | 1.25162242820201e−24 |
| | | pECL_A: NC_014107 | |
| 6 | NC_014107 | Enterobacter cloacae subsp. cloacae ATCC 13047 plasmid | 2.31689992231266e−24 |
| | | pECL_A: NC_014107 | |
| 7 | NC_014107 | Enterobacter cloacae subsp. cloacae ATCC 13047 plasmid | 2.46438038993034e−24 |
| | | pECL_A: NC_014107 | |
| 8 | NC_014107 | Enterobacter cloacae subsp. cloacae ATCC 13047 plasmid | 2.46438038993034e−24 |
| | | pECL_A: NC_014107 | |
| 9 | NZ_GG657370 | Citrobacter sp. 30_2 genomic scaffold supercont1.5: | 2.46438038993034e−24 |
| | | NZ_GG657370 | |
| 10 | NZ_GG657370 | Citrobacter sp. 30_2 genomic scaffold supercont1.5: | 1.59357817134779e−23 |
| | | NZ_GG657370 | |
| 11 | NC_009838 | Escherichia coli APEC O1 plasmid pAPEC-O1-R: NC_009838 | 1.59357817134779e−23 |
| 12 | NC_009778 | Enterobacter sakazakii ATCC BAA-894: NC_009778 | 2.83245228849161e−23 |
| 13 | NC_014107 | Enterobacter cloacae subsp. cloacae ATCC 13047 plasmid | 2.83245228849161e−23 |
| | | pECL_A: NC_014107 | |
| 14 | NZ_ADUD01000537 | Escherichia coli MS 196-1 E_coli196-1-1.0_Cont1482.1: | 9.1281268279348e−23 |
| | | NZ_ADUD01000537 | |
| 15 | NC_014121 | Enterobacter cloacae subsp. cloacae ATCC 13047 | 2.16502306009163e−22 |
| | | chromosome: NC_014121 | |
| 16 | NZ_ABFH01000001 | Salmonella enterica subsp. enterica serovar Virchow str. | 4.49434330590708e−22 |
| | | SL491, unfinished sequence: NZ_ABFH01000001 | |
| 17 | NC_004741 | Shigella flexneri 2a str. 2457T: NC_004741 | 1.02679325501045e−21 |
| 18 | NC_014121 | Enterobacter cloacae subsp. cloacae ATCC 13047 | 1.4942758061424e−21 |
| | | chromosome: NC_014121 | |
| 19 | NZ_AFBO01000168 | Klebsiella sp. MS 92-3 K_spMS92-3-1.0_Cont398.10: | 2.33876952186319e−21 |
| | | NZ_AFBO01000168 | |
| 20 | NC_014121 | Enterobacter cloacae subsp. cloacae ATCC 13047 | 7.16913512003583e−16 |
| | | chromosome: NC_014121 | |
| 21 | CP001383 | Shigella flexneri 2002017: CP001383 | 1.0532279235518e−15 |
| 22 | CP001637 | Escherichia coli DH1: CP001637 | 4.34714801916322e−15 |
| 23 | NZ_ADWT01000006 | Escherichia coli MS 124-1 E_coliMS124-1-1.0.1_Cont5.1: | 2.30933700130366e−14 |
| | | NZ_ADWT01000006 | |
| 24 | NZ_ADTR01000359 | Escherichia coli MS 21-1 E_coli21-1-1.0_Cont669.1: | 3.84987338572512e−13 |
| | | NZ_ADTR01000359 | |
| 25 | NC_014121 | Enterobacter cloacae subsp. cloacae ATCC 13047 | 5.47488441522503e−11 |
| | | chromosome: NC_014121 | |
| 26 | NZ_AAJV01000019 | Escherichia coli E22, unfinished sequence: | 9.06569667406974e−10 |
| | | NZ_AAJV01000019 | |
| 27 | FP929040 | Enterobacter cloacae subsp. cloacae NCTC 9394 draft | 1.83557061686134e−09 |
| | | genome.: FP929040 | |
| 28 | FP929040 | Enterobacter cloacae subsp. cloacae NCTC 9394 draft | 3.37768924887661e−09 |
| | | genome.: FP929040 | |
| 29 | FP929040 | Enterobacter cloacae subsp. cloacae NCTC 9394 draft | 5.84222468117604e−09 |
| | | genome.: FP929040 | |
| 30 | NZ_AFHR01000043 | Enterobacter hormaechei ATCC 49162 contig00043: | 8.80996353751187e−09 |
| | | NZ_AFHR01000043 | |
| 31 | FP929040 | Enterobacter cloacae subsp. cloacae NCTC 9394 draft | 1.29388450812614e−08 |
| | | genome.: FP929040 | |
| 32 | FP929040 | Enterobacter cloacae subsp. cloacae NCTC 9394 draft | 1.29388450812614e−08 |
| | | genome.: FP929040 | |
| 33 | FP929040 | Enterobacter cloacae subsp. cloacae NCTC 9394 draft | 1.29388450812614e−08 |
| | | genome.: FP929040 | |
| 34 | NZ_AFHR01000073 | Enterobacter hormaechei ATCC 49162 contig00073: | 1.29388450812614e−08 |
| | | NZ_AFHR01000073 | |
| 35 | NZ_AFHR01000073 | Enterobacter hormaechei ATCC 49162 contig00073: | 1.29388450812614e−08 |
| | | NZ_AFHR01000073 | |
| 36 | NZ_AFHR01000034 | Enterobacter hormaechei ATCC 49162 contig00034: | 1.29388450812614e−08 |
| | | NZ_AFHR01000034 | |
| 37 | NZ_AFHR01000073 | Enterobacter hormaechei ATCC 49162 contig00073: | 2.23051874499664e−08 |
| | | NZ_AFHR01000073 | |
| 38 | FP929040 | Enterobacter cloacae subsp. cloacae NCTC 9394 draft | 2.39066831640169e−08 |
| | | genome.: FP929040 | |
| 39 | NZ_AFHR01000062 | Enterobacter hormaechei ATCC 49162 contig00062: | 2.39066831640169e−08 |
| | | NZ_AFHR01000062 | |
| 40 | NC_014618 | Enterobacter cloacae SCF1 chromosome: NC_014618 | 2.76892470483105e−08 |
| 41 | NC_014618 | Enterobacter cloacae SCF1 chromosome: NC_014618 | 3.01843352491008e−08 |
| 42 | NZ_ABWM01000064 | Enterobacter cancerogenus ATCC 35316, unfinished | 4.40355882800235e−08 |
| | | sequence: NZ_ABWM01000064 | |
| 43 | NC_014121 | Enterobacter cloacae subsp. cloacae ATCC 13047 | 4.44394973624704e−08 |
| | | chromosome: NC_014121 | |
| 44 | NZ_GG657370 | Citrobacter sp. 30_2 genomic scaffold supercont1.5: | 5.11952538533182e−08 |
| | | NZ_GG657370 | |
| 45 | NC_014618 | Enterobacter cloacae SCF1 chromosome: NC_014618 | 5.14762193286233e−08 |
| 46 | NZ_AFHR01000015 | Enterobacter hormaechei ATCC 49162 contig00015: | 5.14762193286233e−08 |
| | | NZ_AFHR01000015 | |
| 47 | FP929040 | Enterobacter cloacae subsp. cloacae NCTC 9394 draft | 5.31046635969439e−08 |
| | | genome.: FP929040 | |
| 48 | FP929040 | Enterobacter cloacae subsp. cloacae NCTC 9394 draft | 5.31046635969439e−08 |
| | | genome.: FP929040 | |
| 49 | FP929040 | Enterobacter cloacae subsp. cloacae NCTC 9394 draft | 5.31046635969439e−08 |
| | | genome.: FP929040 | |
| 50 | FP929040 | Enterobacter cloacae subsp. cloacae NCTC 9394 draft | 5.31046635969439e−08 |
| | | genome.: FP929040 | |

TABLE 5b
Data for Enterobacter, particularly Enterobacter cloacae (continued)

| No. | sign_phenos | sign_phenos_class | best_pheno | best_pheno_class |
|---|---|---|---|---|
| 1 | AZT; CAX; CAZ; CFT; CP; CPE; CRM; ETP; GM; LVX; | aminoglycoside; fluoroquinolone; lactam; | T/S | other |
| | P/T; TO; T/S | other | | |
| 2 | AZT; CAX; CAZ; CFT; CP; CPE; CRM; GM; LVX; P/T; | aminoglycoside; fluoroquinolone; lactam; | T/S | other |
| | TO; T/S | other | | |
| 3 | AZT; CAX; CAZ; CFT; CP; CPE; CRM; GM; LVX; P/T; | aminoglycoside; fluoroquinolone; lactam; | T/S | other |
| | TO; T/S | other | | |
| 4 | AZT; CAX; CAZ; CFT; CP; CPE; CRM; GM; LVX; P/T; | aminoglycoside; fluoroquinolone; lactam; | T/S | other |
| | TO; T/S | other | | |
| 5 | AZT; CAX; CAZ; CFT; CP; CPE; CRM; GM; LVX; P/T; | aminoglycoside; fluoroquinolone; lactam; | T/S | other |
| | TO; T/S | other | | |
| 6 | AZT; CAX; CAZ; CFT; CP; CPE; ETP; GM; LVX; P/T; | aminoglycoside; fluoroquinolone; lactam; | T/S | other |
| | TO; T/S | other | | |
| 7 | AZT; CAX; CAZ; CFT; CP; CPE; GM; LVX; TO; T/S | aminoglycoside; fluoroquinolone; lactam; | T/S | other |
| | | other | | |
| 8 | AZT; CAX; CAZ; CFT; CP; CPE; GM; LVX; TO; T/S | aminoglycoside; fluoroquinolone; lactam; | T/S | other |
| | | other | | |
| 9 | AZT; CAX; CAZ; CFT; CP; CPE; CRM; GM; LVX; TO; | aminoglycoside; fluoroquinolone; lactam; | T/S | other |
| | T/S | other | | |
| 10 | AZT; CAX; CAZ; CFT; CP; CPE; CRM; GM; LVX; P/T; | aminoglycoside; fluoroquinolone; lactam; | T/S | other |
| | TO; T/S | other | | |
| 11 | AZT; CAX; CAZ; CFT; CP; CPE; GM; LVX; TO; T/S | aminoglycoside; fluoroquinolone; lactam; | T/S | other |
| | | other | | |
| 12 | AZT; CAX; CAZ; CFT; CP; CPE; CRM; GM; LVX; TO; | aminoglycoside; fluoroquinolone; lactam; | T/S | other |
| | T/S | other | | |
| 13 | AZT; CAX; CAZ; CFT; CP; CPE; GM; LVX; TO; T/S | aminoglycoside; fluoroquinolone; lactam; | T/S | other |
| | | other | | |
| 14 | AZT; CAX; CAZ; CFT; CP; CPE; CRM; ETP; GM; LVX; | aminoglycoside; fluoroquinolone; lactam; | GM | aminoglycoside |
| | P/T; TO; T/S | other | | |
| 15 | AZT; CAX; CAZ; CFT; CP; CPE; CRM; ETP; GM; LVX; | aminoglycoside; fluoroquinolone; lactam; | T/S | other |
| | P/T; TO; T/S | other | | |
| 16 | AZT; CAX; CAZ; CFT; CP; CPE; CRM; ETP; GM; LVX; | aminoglycoside; fluoroquinolone; lactam; | GM | aminoglycoside |
| | P/T; TO; T/S | other | | |
| 17 | AZT; CAX; CAZ; CFT; CP; CPE; CRM; GM; LVX; P/T; | aminoglycoside; fluoroquinolone; lactam; | GM | aminoglycoside |
| | TO; T/S | other | | |
| 18 | AZT; CAX; CAZ; CFT; CP; CPE; CRM; ETP; GM; LVX; | aminoglycoside; fluoroquinolone; lactam; | TO | aminoglycoside |
| | P/T; TO; T/S | other | | |
| 19 | AZT; CAX; CAZ; CFT; CP; CPE; CRM; ETP; GM; LVX; | aminoglycoside; fluoroquinolone; lactam; | T/S | other |
| | P/T; TO; T/S | other | | |
| 20 | AZT; CAX; CAZ; CFT; CP; CPE; CRM; GM; LVX; P/T; | aminoglycoside; fluoroquinolone; lactam; | TO | aminoglycoside |
| | TO; T/S | other | | |
| 21 | AZT; CAX; CAZ; CFT; CP; CPE; GM; LVX; P/T; TO; | aminoglycoside; fluoroquinolone; lactam; | T/S | other |
| | T/S | other | | |
| 22 | AZT; CAX; CAZ; CFT; CP; GM; LVX; P/T; TO; T/S | aminoglycoside; fluoroquinolone; lactam; | T/S | other |
| | | other | | |
| 23 | AZT; CAX; CAZ; CFT; CP; CPE; GM; LVX; P/T; TO; | aminoglycoside; fluoroquinolone; lactam; | GM | aminoglycoside |
| | T/S | other | | |
| 24 | AZT; CAX; CAZ; CFT; CP; CPE; GM; LVX; P/T; TO; | aminoglycoside; fluoroquinolone; lactam; | GM | aminoglycoside |
| | T/S | other | | |
| 25 | AZT; CAX; CAZ; CFT; CP; CPE; ETP; GM; LVX; P/T; | aminoglycoside; fluoroquinolone; lactam; | TO | aminoglycoside |
| | TO; T/S | other | | |
| 26 | AZT; CAX; CAZ; CFT; CP; CPE; ETP; GM; LVX; TO; | aminoglycoside; fluoroquinolone; lactam; | TO | aminoglycoside |
| | T/S | other | | |
| 27 | AZT; CAX; CAZ; CFT; CP; CPE; GM; LVX; P/T; TO; | aminoglycoside; fluoroquinolone; lactam; | CPE | lactam |
| | T/S | other | | |
| 28 | AZT; CAX; CAZ; CFT; CPE; GM; LVX; P/T; TO | aminoglycoside; fluoroquinolone; lactam | CPE | lactam |
| 29 | AZT; CAX; CAZ; CFT; CPE; GM; LVX; P/T; TO; T/S | aminoglycoside; fluoroquinolone; lactam; | CPE | lactam |
| | | other | | |
| 30 | AZT; CAZ; CFT; CP; CPE; GM; LVX; P/T; TO; T/S | aminoglycoside; fluoroquinolone; lactam; | CPE | lactam |
| | | other | | |
| 31 | AZT; CAX; CAZ; CPE; GM; LVX; P/T; TO; T/S | aminoglycoside; fluoroquinolone; lactam; | CPE | lactam |
| | | other | | |
| 32 | AZT; CAX; CAZ; CPE; GM; LVX; P/T; TO; T/S | aminoglycoside; fluoroquinolone; lactam; | CPE | lactam |
| | | other | | |
| 33 | AZT; CAX; CAZ; CPE; GM; LVX; P/T; TO; T/S | aminoglycoside; fluoroquinolone; lactam; | CPE | lactam |
| | | other | | |
| 34 | AZT; CAX; CAZ; CPE; GM; LVX; P/T; TO; T/S | aminoglycoside; fluoroquinolone; lactam; | CPE | lactam |
| | | other | | |
| 35 | AZT; CAX; CAZ; CPE; GM; LVX; P/T; TO; T/S | aminoglycoside; fluoroquinolone; lactam; | CPE | lactam |
| | | other | | |
| 36 | AZT; CAX; CAZ; CPE; GM; LVX; P/T; TO; T/S | aminoglycoside; fluoroquinolone; lactam; | CPE | lactam |
| | | other | | |
| 37 | AZT; CAX; CAZ; CPE; GM; LVX; P/T; TO; T/S | aminoglycoside; fluoroquinolone; lactam; | CPE | lactam |
| | | other | | |
| 38 | CP; CPE; GM; LVX; TO; T/S | aminoglycoside; fluoroquinolone; lactam; | CPE | lactam |
| | | other | | |
| 39 | CP; CPE; GM; LVX; TO; T/S | aminoglycoside; fluoroquinolone; lactam; | CPE | lactam |
| | | other | | |
| 40 | AZT; CAX; CAZ; CFT; CRM; GM; P/T; TO; T/S | aminoglycoside; lactam; other | T/S | other |
| 41 | AZT; CAX; CAZ; CFT; CP; CPE; ETP; GM; LVX; P/T; | aminoglycoside; fluoroquinolone; lactam; | CPE | lactam |
| | TO; T/S | other | | |
| 42 | CP; CPE; GM; LVX; TO; T/S | aminoglycoside; fluoroquinolone; lactam; | CPE | lactam |
| | | other | | |
| 43 | AZT; CAX; CAZ; CPE; GM; LVX; P/T; TO; T/S | aminoglycoside; fluoroquinolone; lactam; | CPE | lactam |
| | | other | | |
| 44 | AZT; CAX; CAZ; CFT; CP; GM; LVX; P/T; TO; T/S | aminoglycoside; fluoroquinolone; lactam; | T/S | other |
| | | other | | |
| 45 | CAX; CAZ; CPE; GM; LVX; P/T; TO; T/S | aminoglycoside; fluoroquinolone; lactam; | CPE | lactam |
| | | other | | |
| 46 | CP; CPE; GM; LVX; TO; T/S | aminoglycoside; fluoroquinolone; lactam; | CPE | lactam |
| | | other | | |
| 47 | AZT; CAX; CAZ; CPE; GM; LVX; P/T; TO; T/S | aminoglycoside; fluoroquinolone; lactam; | CPE | lactam |
| | | other | | |
| 48 | AZT; CAX; CAZ; CPE; GM; LVX; P/T; TO; T/S | aminoglycoside; fluoroquinolone; lactam; | CPE | lactam |
| | | other | | |
| 49 | AZT; CAX; CAZ; CPE; GM; LVX; P/T; TO; T/S | aminoglycoside; fluoroquinolone; lactam; | CPE | lactam |
| | | other | | |
| 50 | AZT; CAX; CAZ; CPE; GM; LVX; P/T; TO; T/S | aminoglycoside; fluoroquinolone; lactam; | CPE | lactam |
| | | other | | |

TABLE 5c
Data for Enterobacter, particularly Enterobacter cloacae (continued)

| No. | num_aminoglycoside | num_fluoroquinolone | num_lactam | num_other |
|---|---|---|---|---|
| 1 | 2 | 2 | 8 | 1 |
| 2 | 2 | 2 | 7 | 1 |
| 3 | 2 | 2 | 7 | 1 |
| 4 | 2 | 2 | 7 | 1 |
| 5 | 2 | 2 | 7 | 1 |
| 6 | 2 | 2 | 7 | 1 |
| 7 | 2 | 2 | 5 | 1 |
| 8 | 2 | 2 | 5 | 1 |
| 9 | 2 | 2 | 6 | 1 |
| 10 | 2 | 2 | 7 | 1 |
| 11 | 2 | 2 | 5 | 1 |
| 12 | 2 | 2 | 6 | 1 |
| 13 | 2 | 2 | 5 | 1 |
| 14 | 2 | 2 | 8 | 1 |
| 15 | 2 | 2 | 8 | 1 |
| 16 | 2 | 2 | 8 | 1 |
| 17 | 2 | 2 | 7 | 1 |
| 18 | 2 | 2 | 8 | 1 |
| 19 | 2 | 2 | 8 | 1 |
| 20 | 2 | 2 | 7 | 1 |
| 21 | 2 | 2 | 6 | 1 |
| 22 | 2 | 2 | 5 | 1 |
| 23 | 2 | 2 | 6 | 1 |
| 24 | 2 | 2 | 6 | 1 |
| 25 | 2 | 2 | 7 | 1 |
| 26 | 2 | 2 | 6 | 1 |
| 27 | 2 | 2 | 6 | 1 |
| 28 | 2 | 1 | 6 | 0 |
| 29 | 2 | 1 | 6 | 1 |
| 30 | 2 | 2 | 5 | 1 |
| 31 | 2 | 1 | 5 | 1 |
| 32 | 2 | 1 | 5 | 1 |
| 33 | 2 | 1 | 5 | 1 |
| 34 | 2 | 1 | 5 | 1 |
| 35 | 2 | 1 | 5 | 1 |
| 36 | 2 | 1 | 5 | 1 |
| 37 | 2 | 1 | 5 | 1 |
| 38 | 2 | 2 | 1 | 1 |
| 39 | 2 | 2 | 1 | 1 |
| 40 | 2 | 0 | 6 | 1 |
| 41 | 2 | 2 | 7 | 1 |
| 42 | 2 | 2 | 1 | 1 |
| 43 | 2 | 1 | 5 | 1 |
| 44 | 2 | 2 | 5 | 1 |
| 45 | 2 | 1 | 4 | 1 |
| 46 | 2 | 2 | 1 | 1 |
| 47 | 2 | 1 | 5 | 1 |
| 48 | 2 | 1 | 5 | 1 |
| 49 | 2 | 1 | 5 | 1 |
| 50 | 2 | 1 | 5 | 1 |

TABLE 5d
Data for Enterobacter, particularly Enterobacter cloacae (continued)

| No. | AZT_pv_adj | CAX_pv_adj | CAZ_pv_adj | CFT_pv_adj | CP_pv_adj |
|---|---|---|---|---|---|
| 1 | 3.58E−10 | 7.39E−09 | 2.80E−11 | 3.62E−09 | 5.27E−08 |
| 2 | 4.06E−06 | 7.65E−06 | 8.35E−07 | 8.00E−07 | 3.72E−07 |
| 3 | 4.06E−06 | 7.65E−06 | 8.35E−07 | 8.00E−07 | 3.72E−07 |
| 4 | 4.06E−06 | 7.65E−06 | 8.35E−07 | 8.00E−07 | 3.72E−07 |
| 5 | 8.70E−07 | 8.75E−06 | 5.21E−07 | 5.80E−07 | 1.18E−06 |
| 6 | 1.92E−12 | 2.08E−13 | 5.48E−12 | 1.92E−12 | 4.74E−09 |
| 7 | 2.20E−05 | 4.05E−05 | 4.94E−06 | 4.85E−06 | 7.75E−07 |
| 8 | 2.20E−05 | 4.05E−05 | 4.94E−06 | 4.85E−06 | 7.75E−07 |
| 9 | 6.62E−06 | 1.21E−05 | 1.34E−06 | 1.27E−06 | 3.72E−07 |
| 10 | 3.70E−06 | 6.73E−06 | 7.48E−07 | 7.08E−07 | 2.65E−06 |
| 11 | 3.46E−05 | 6.07E−05 | 7.99E−06 | 7.84E−06 | 7.16E−07 |
| 12 | 6.62E−06 | 1.21E−05 | 1.34E−06 | 1.27E−06 | 3.14E−06 |
| 13 | 2.20E−05 | 4.05E−05 | 4.94E−06 | 4.85E−06 | 7.75E−07 |
| 14 | 2.41E−09 | 3.66E−10 | 2.89E−10 | 1.33E−09 | 1.31E−11 |
| 15 | 6.79E−08 | 4.49E−08 | 1.13E−08 | 3.99E−08 | 4.19E−12 |
| 16 | 3.51E−09 | 1.67E−09 | 8.09E−10 | 8.35E−10 | 5.65E−12 |
| 17 | 3.11E−11 | 6.47E−11 | 7.01E−12 | 5.47E−11 | 1.53E−06 |
| 18 | 4.36E−12 | 6.39E−12 | 5.85E−13 | 5.48E−12 | 5.70E−07 |
| 19 | 6.79E−08 | 4.49E−08 | 1.13E−08 | 3.99E−08 | 3.61E−11 |
| 20 | 5.39E−09 | 1.23E−08 | 5.84E−09 | 6.70E−09 | 5.19E−07 |
| 21 | 3.36E−07 | 5.25E−07 | 5.19E−07 | 3.74E−06 | 3.91E−05 |
| 22 | 4.53E−07 | 8.07E−07 | 7.17E−07 | 6.01E−06 | 7.16E−05 |
| 23 | 1.62E−07 | 3.02E−07 | 2.83E−08 | 5.65E−08 | 9.46E−05 |
| 24 | 8.58E−09 | 1.75E−08 | 5.92E−08 | 2.01E−07 | 7.82E−07 |
| 25 | 5.28E−06 | 5.19E−07 | 1.32E−06 | 7.50E−07 | 1.27E−05 |
| 26 | 3.71E−05 | 2.06E−06 | 1.56E−05 | 9.73E−06 | 1.34E−04 |
| 27 | 2.41E−04 | 8.91E−05 | 8.91E−05 | 4.87E−04 | 5.72E−04 |
| 28 | 2.12E−03 | 7.75E−04 | 1.61E−03 | 5.63E−03 | 2.33E−02 |
| 29 | 3.60E−03 | 1.44E−03 | 1.46E−03 | 6.84E−03 | 1.58E−02 |
| 30 | 1.63E−03 | 1.30E−02 | 1.26E−03 | 9.88E−03 | 1.03E−03 |
| 31 | 8.73E−03 | 1.90E−03 | 3.60E−03 | 1.54E−02 | 2.18E−02 |
| 32 | 8.73E−03 | 1.90E−03 | 3.60E−03 | 1.54E−02 | 2.18E−02 |
| 33 | 8.73E−03 | 1.90E−03 | 3.60E−03 | 1.54E−02 | 2.18E−02 |
| 34 | 8.73E−03 | 1.90E−03 | 3.60E−03 | 1.54E−02 | 2.18E−02 |
| 35 | 8.73E−03 | 1.90E−03 | 3.60E−03 | 1.54E−02 | 2.18E−02 |
| 36 | 8.73E−03 | 1.90E−03 | 3.60E−03 | 1.54E−02 | 2.18E−02 |
| 37 | 9.06E−03 | 2.62E−03 | 4.92E−03 | 1.99E−02 | 2.22E−02 |
| 38 | 3.58E−02 | 1.04E−02 | 1.75E−02 | 5.31E−02 | 2.20E−05 |
| 39 | 5.33E−02 | 1.78E−02 | 2.85E−02 | 7.63E−02 | 6.85E−05 |
| 40 | 8.52E−05 | 3.90E−05 | 6.01E−06 | 2.49E−05 | 1.29E−02 |
| 41 | 4.11E−06 | 7.41E−04 | 4.26E−05 | 1.08E−03 | 6.16E−05 |
| 42 | 4.35E−02 | 1.36E−02 | 2.23E−02 | 6.48E−02 | 2.37E−05 |
| 43 | 8.79E−03 | 2.56E−03 | 4.80E−03 | 1.96E−02 | 2.95E−02 |
| 44 | 5.44E−03 | 1.03E−03 | 6.23E−04 | 1.01E−03 | 1.45E−04 |
| 45 | 1.49E−02 | 4.69E−03 | 8.56E−03 | 3.09E−02 | 3.86E−02 |
| 46 | 2.22E−01 | 6.69E−02 | 1.35E−01 | 3.01E−01 | 6.26E−04 |
| 47 | 8.87E−03 | 1.93E−03 | 3.69E−03 | 1.56E−02 | 3.05E−02 |
| 48 | 8.87E−03 | 1.93E−03 | 3.69E−03 | 1.56E−02 | 3.05E−02 |
| 49 | 8.87E−03 | 1.93E−03 | 3.69E−03 | 1.56E−02 | 3.05E−02 |
| 50 | 8.87E−03 | 1.93E−03 | 3.69E−03 | 1.56E−02 | 3.05E−02 |

TABLE 5e
Data for Enterobacter, particularly
Enterobacter cloacae (continued)

| No. | CPE_pv_adj | CRM_pv_adj | ETP_pv_adj | GM_pv_adj |
|---|---|---|---|---|
| 1 | 2.76E−09 | 1.20E−03 | 1.29E−04 | 3.48E−19 |
| 2 | 2.95E−05 | 2.74E−03 | 5.44E−02 | 5.95E−17 |
| 3 | 2.95E−05 | 2.74E−03 | 5.44E−02 | 5.95E−17 |
| 4 | 2.95E−05 | 2.74E−03 | 5.44E−02 | 5.95E−17 |
| 5 | 5.40E−05 | 2.87E−03 | 9.20E−02 | 6.93E−16 |
| 6 | 3.27E−08 | 3.20E−02 | 6.76E−03 | 1.07E−19 |
| 7 | 6.14E−05 | 1.06E−02 | 5.77E−02 | 2.51E−16 |
| 8 | 6.14E−05 | 1.06E−02 | 5.77E−02 | 2.51E−16 |
| 9 | 5.81E−05 | 2.77E−03 | 7.62E−02 | 4.00E−16 |
| 10 | 5.02E−05 | 3.99E−03 | 3.88E−02 | 2.55E−15 |
| 11 | 5.72E−05 | 1.10E−02 | 5.64E−02 | 1.59E−16 |
| 12 | 5.81E−05 | 6.94E−03 | 4.04E−02 | 4.15E−15 |
| 13 | 1.93E−05 | 1.06E−02 | 5.77E−02 | 2.51E−16 |
| 14 | 5.33E−09 | 5.60E−04 | 8.61E−04 | 9.13E−23 |
| 15 | 1.62E−07 | 1.89E−03 | 7.13E−04 | 4.13E−22 |
| 16 | 1.55E−08 | 1.01E−03 | 1.04E−03 | 4.49E−22 |
| 17 | 5.31E−08 | 9.22E−03 | 1.04E−02 | 1.03E−21 |
| 18 | 1.37E−08 | 1.77E−03 | 7.24E−03 | 1.52E−21 |
| 19 | 3.31E−08 | 1.89E−03 | 6.74E−03 | 5.26E−21 |
| 20 | 5.79E−05 | 2.43E−03 | 5.85E−02 | 1.07E−14 |
| 21 | 8.87E−03 | 1.21E−02 | 2.44E−01 | 2.97E−08 |
| 22 | 1.76E−02 | 1.63E−02 | 2.41E−01 | 7.76E−08 |
| 23 | 2.82E−06 | 7.01E−02 | 5.22E−02 | 2.31E−14 |
| 24 | 3.31E−04 | 2.06E−02 | 1.04E−02 | 3.85E−13 |
| 25 | 1.65E−04 | 1.14E−01 | 1.77E−03 | 5.27E−08 |
| 26 | 1.92E−04 | 5.27E−02 | 1.45E−03 | 1.24E−08 |
| 27 | 1.84E−09 | 3.12E−02 | 9.47E−02 | 3.86E−04 |
| 28 | 3.38E−09 | 2.11E−01 | 1.66E−01 | 6.74E−04 |
| 29 | 5.84E−09 | 6.96E−02 | 2.65E−01 | 9.71E−04 |
| 30 | 8.81E−09 | 1.75E−01 | 1.27E−01 | 2.57E−04 |
| 31 | 1.29E−08 | 8.58E−02 | 3.28E−01 | 1.48E−03 |
| 32 | 1.29E−08 | 8.58E−02 | 3.28E−01 | 1.48E−03 |
| 33 | 1.29E−08 | 8.58E−02 | 3.28E−01 | 1.48E−03 |
| 34 | 1.29E−08 | 8.58E−02 | 3.28E−01 | 1.48E−03 |
| 35 | 1.29E−08 | 8.58E−02 | 3.28E−01 | 1.48E−03 |
| 36 | 1.29E−08 | 8.58E−02 | 3.28E−01 | 1.48E−03 |
| 37 | 2.23E−08 | 8.52E−02 | 3.28E−01 | 1.51E−03 |
| 38 | 2.39E−08 | 4.38E−01 | 5.64E−02 | 4.16E−03 |
| 39 | 2.39E−08 | 4.38E−01 | 5.64E−02 | 4.16E−03 |
| 40 | 1.69E−01 | 6.82E−04 | 7.60E−01 | 2.98E−04 |
| 41 | 3.02E−08 | 3.74E−02 | 3.81E−04 | 1.38E−04 |
| 42 | 4.40E−08 | 3.77E−01 | 5.72E−02 | 4.38E−03 |
| 43 | 4.44E−08 | 6.75E−02 | 3.31E−01 | 2.17E−03 |
| 44 | 2.31E−02 | 4.84E−02 | 6.10E−02 | 1.15E−06 |
| 45 | 5.15E−08 | 8.55E−02 | 2.60E−01 | 3.19E−03 |
| 46 | 5.15E−08 | 7.80E−02 | 4.73E−01 | 1.13E−03 |
| 47 | 5.31E−08 | 1.08E−01 | 2.67E−01 | 2.37E−03 |
| 48 | 5.31E−08 | 1.08E−01 | 2.67E−01 | 2.37E−03 |
| 49 | 5.31E−08 | 1.08E−01 | 2.67E−01 | 2.37E−03 |
| 50 | 5.31E−08 | 1.08E−01 | 2.67E−01 | 2.37E−03 |

TABLE 5f
Data for Enterobacter, particularly
Enterobacter cloacae (continued)

| No. | LVX_pv_adj | P/T_pv_adj | TO_pv_adj | T/S_pv_adj |
|---|---|---|---|---|
| 1 | 8.81E−09 | 1.52E−04 | 2.06E−19 | 5.49E−27 |
| 2 | 2.74E−08 | 6.34E−03 | 2.69E−20 | 5.83E−25 |
| 3 | 2.74E−08 | 6.34E−03 | 2.69E−20 | 5.83E−25 |
| 4 | 2.74E−08 | 6.34E−03 | 2.69E−20 | 5.83E−25 |
| 5 | 5.07E−07 | 6.25E−03 | 9.93E−19 | 1.25E−24 |
| 6 | 1.21E−11 | 4.05E−05 | 5.70E−21 | 2.32E−24 |
| 7 | 5.15E−08 | 1.58E−02 | 1.59E−19 | 2.46E−24 |
| 8 | 5.15E−08 | 1.58E−02 | 1.59E−19 | 2.46E−24 |
| 9 | 7.06E−08 | 1.10E−02 | 1.73E−19 | 2.46E−24 |
| 10 | 3.37E−07 | 8.08E−03 | 1.06E−18 | 1.59E−23 |
| 11 | 4.09E−08 | 2.07E−02 | 9.23E−20 | 1.59E−23 |
| 12 | 3.72E−07 | 1.10E−02 | 1.95E−18 | 2.83E−23 |
| 13 | 5.15E−08 | 1.58E−02 | 1.59E−19 | 2.83E−23 |
| 14 | 1.31E−11 | 2.13E−07 | 5.43E−22 | 1.85E−22 |
| 15 | 4.19E−12 | 8.40E−07 | 8.04E−22 | 2.17E−22 |
| 16 | 5.65E−12 | 5.70E−07 | 2.63E−21 | 1.03E−21 |
| 17 | 1.00E−08 | 4.60E−04 | 1.44E−21 | 4.11E−18 |
| 18 | 2.49E−09 | 1.68E−04 | 1.49E−21 | 4.99E−18 |
| 19 | 4.19E−12 | 8.40E−07 | 7.92E−21 | 2.34E−21 |
| 20 | 6.44E−09 | 2.28E−04 | 7.17E−16 | 1.02E−15 |
| 21 | 8.28E−05 | 6.44E−04 | 3.80E−10 | 1.05E−15 |
| 22 | 1.82E−04 | 9.24E−04 | 1.96E−09 | 4.35E−15 |
| 23 | 1.55E−05 | 1.40E−04 | 3.69E−14 | 6.50E−11 |
| 24 | 7.82E−07 | 1.61E−04 | 8.30E−12 | 1.21E−11 |
| 25 | 3.34E−06 | 3.34E−03 | 5.47E−11 | 4.91E−08 |
| 26 | 6.31E−06 | 1.70E−02 | 9.07E−10 | 5.12E−08 |
| 27 | 2.79E−05 | 2.12E−03 | 1.68E−04 | 4.44E−04 |
| 28 | 2.35E−03 | 8.21E−03 | 2.41E−03 | 3.78E−02 |
| 29 | 1.41E−03 | 2.25E−03 | 9.05E−04 | 1.74E−03 |
| 30 | 1.97E−05 | 1.77E−03 | 8.04E−05 | 5.50E−04 |
| 31 | 2.08E−03 | 5.50E−03 | 1.36E−03 | 3.40E−03 |
| 32 | 2.08E−03 | 5.50E−03 | 1.36E−03 | 3.40E−03 |
| 33 | 2.08E−03 | 5.50E−03 | 1.36E−03 | 3.40E−03 |
| 34 | 2.08E−03 | 5.50E−03 | 1.36E−03 | 3.40E−03 |
| 35 | 2.08E−03 | 5.50E−03 | 1.36E−03 | 3.40E−03 |
| 36 | 2.08E−03 | 5.50E−03 | 1.36E−03 | 3.40E−03 |
| 37 | 2.10E−03 | 7.39E−03 | 1.42E−03 | 3.42E−03 |
| 38 | 1.40E−06 | 4.00E−02 | 2.39E−03 | 8.45E−04 |
| 39 | 5.74E−06 | 7.03E−02 | 2.39E−03 | 8.45E−04 |
| 40 | 1.29E−02 | 8.60E−03 | 1.87E−05 | 2.77E−08 |
| 41 | 6.73E−06 | 8.68E−06 | 4.49E−05 | 2.53E−04 |
| 42 | 1.52E−06 | 4.87E−02 | 2.44E−03 | 8.72E−04 |
| 43 | 3.07E−03 | 5.47E−03 | 1.99E−03 | 2.25E−03 |
| 44 | 1.45E−04 | 6.88E−03 | 4.69E−06 | 5.12E−08 |
| 45 | 3.22E−03 | 9.52E−03 | 2.86E−03 | 3.22E−03 |
| 46 | 6.11E−05 | 1.82E−01 | 2.53E−04 | 3.05E−04 |
| 47 | 3.31E−03 | 5.73E−03 | 2.11E−03 | 5.16E−03 |
| 48 | 3.31E−03 | 5.73E−03 | 2.11E−03 | 5.16E−03 |
| 49 | 3.31E−03 | 5.73E−03 | 2.11E−03 | 5.16E−03 |
| 50 | 3.31E−03 | 5.73E−03 | 2.11E−03 | 5.16E−03 |

TABLE 5g
Data for Enterobacter, particularly Enterobacter cloacae (continued)

| No. | Locus.Tag | Gene.Symbol | GenBank.Accession | Chromosome |
|---|---|---|---|---|
| 1 | ETAE_p041 | folP | YP_003297635 | plasmid pEIB202 |
| 2 | ECL_A197 | | YP_003602692 | plasmid pECL_A |
| 3 | APECO1_O1R60 | terY1 | YP_001481413 | plasmid pAPEC-O1-R |
| 4 | APECO1_O1R58 | terY2 | YP_001481411 | plasmid pAPEC-O1-R |
| 5 | ECL_A215 | | YP_003602710 | plasmid pECL_A |
| 6 | ECL_A245 | | YP_003602738 | plasmid pECL_A |
| 7 | ECL_A211 | | YP_003602706 | plasmid pECL_A |
| 8 | ECL_A213 | | YP_003602708 | plasmid pECL_A |
| 9 | CSAG_04328 | | ZP_04559059 | |
| 10 | CSAG_04340 | | ZP_04559071 | |
| 11 | APECO1_O1R72 | terD | YP_001481425 | plasmid pAPEC-O1-R |
| 12 | ESA_01791 | | YP_001437881 | |
| 13 | ECL_A210 | | YP_003602705 | plasmid pECL_A |
| 14 | HMPREF9551_04611 | | ZP_07191964 | |
| 15 | ECL_03822 | merP | YP_003614305 | |
| 16 | Salmoentericaenterica_010100000105 | | ZP_02702049 | |
| 17 | S2707 | parA | NP_838057 | |
| 18 | ECL_03815 | | YP_003614298 | |
| 19 | HMPREF9538_01300 | | ZP_08303641 | |
| 20 | ECL_00479 | | YP_003610994 | |
| 21 | SFxv_1737 | | ADA73942 | |
| 22 | EcDH1_2078 | | ACX39734 | |
| 23 | HMPREF9347_01086 | | ZP_07208640 | |
| 24 | HMPREF9530_03894 | | ZP_07153755 | |
| 25 | ECL_00391 | | YP_003610906 | |
| 26 | EcolE2_01002790 | | ZP_00728858 | |
| 27 | ENC_13410 | | CBK85143 | |
| 28 | ENC_03420 | | CBK84384 | |
| 29 | ENC_31170 | | CBK86512 | |
| 30 | HMPREF9086_2435 | | ZP_08498173 | |
| 31 | ENC_11900 | | CBK85029 | |
| 32 | ENC_02650 | | CBK84321 | |
| 33 | ENC_02700 | | CBK84325 | |
| 34 | HMPREF9086_4455 | amsH2 | ZP_08500191 | |
| 35 | HMPREF9086_4454 | yccY2 | ZP_08500190 | |
| 36 | HMPREF9086_2100 | yjdF | ZP_08497838 | |
| 37 | HMPREF9086_4460 | ligA2 | ZP_08500196 | |
| 38 | ENC_28850 | | CBK86326 | |
| 39 | HMPREF9086_3524 | gatAX | ZP_08499260 | |
| 40 | Entcl_2219 | | YP_003941757 | |
| 41 | Entcl_2207 | | YP_003941745 | |
| 42 | ENTCAN_03923 | | ZP_03284103 | |
| 43 | ECL_01132 | | YP_003611642 | |
| 44 | CSAG_04209 | | ZP_04558940 | |
| 45 | Entcl_0777 | | YP_003940336 | |
| 46 | HMPREF9086_0855 | | ZP_08496597 | |
| 47 | ENC_21030 | | CBK85719 | |
| 48 | ENC_20990 | | CBK85716 | |
| 49 | ENC_21000 | | CBK85717 | |
| 50 | ENC_21040 | | CBK85720 | |

TABLE 5h
Data for Enterobacter, particularly
Enterobacter cloacae (continued)

| No. | Start.Coord | End.Coord | Strand | Scaffold.ID |
|---|---|---|---|---|
| 1 | 32101 | 32916 | − | 646311959 |
| 2 | 142295 | 142936 | − | 646564617 |
| 3 | 68792 | 69511 | − | 640753093 |
| 4 | 67490 | 68131 | − | 640753093 |
| 5 | 156077 | 157318 | + | 646564617 |
| 6 | 176747 | 177670 | − | 646564617 |
| 7 | 153338 | 154378 | + | 646564617 |
| 8 | 155073 | 155648 | + | 646564617 |
| 9 | 377133 | 378173 | − | 646206736 |
| 10 | 388284 | 389441 | + | 646206736 |
| 11 | 80263 | 80841 | + | 640753093 |
| 12 | 1731242 | 1732198 | − | 640753067 |
| 13 | 152860 | 153315 | + | 646564617 |
| 14 | 97 | 531 | − | 648293053 |
| 15 | 3908948 | 3909223 | + | 646564624 |
| 16 | 16271 | 16636 | − | 641778223 |
| 17 | 2602155 | 2602892 | − | 637000219 |
| 18 | 3903410 | 3903712 | + | 646564624 |
| 19 | 6404 | 6640 | + | 651333085 |
| 20 | 482851 | 484329 | − | 646564624 |
| 21 | 1636971 | 1637258 | − | 646862363 |
| 22 | 2232606 | 2232845 | + | 646862383 |
| 23 | 2726 | 5692 | − | 648294279 |
| 24 | 1918 | 3231 | − | 648290583 |
| 25 | 409807 | 410283 | + | 646564624 |
| 26 | 14395 | 15375 | + | 638358747 |
| 27 | 1397946 | 1398188 | − | 650378029 |
| 28 | 360699 | 361856 | + | 650378029 |
| 29 | 3151035 | 3151685 | − | 650378029 |
| 30 | 192614 | 193519 | + | 651335147 |
| 31 | 1250898 | 1252163 | + | 650378029 |
| 32 | 274155 | 276332 | − | 650378029 |
| 33 | 280790 | 281458 | − | 650378029 |
| 34 | 111547 | 112680 | − | 651335177 |
| 35 | 111116 | 111559 | − | 651335177 |
| 36 | 33364 | 34074 | + | 651335138 |
| 37 | 117314 | 119053 | − | 651335177 |
| 38 | 2904606 | 2905577 | − | 650378029 |
| 39 | 8440 | 9756 | − | 651335166 |
| 40 | 2349542 | 2349967 | + | 649633020 |
| 41 | 2334593 | 2335594 | − | 649633020 |
| 42 | 28272 | 29567 | − | 643006662 |
| 43 | 1168855 | 1169388 | + | 646564624 |
| 44 | 254005 | 255187 | − | 646206736 |
| 45 | 812618 | 813094 | + | 649633020 |
| 46 | 13947 | 15560 | − | 651335119 |
| 47 | 2148896 | 2151391 | + | 650378029 |
| 48 | 2145171 | 2145458 | + | 650378029 |
| 49 | 2145486 | 2146736 | + | 650378029 |
| 50 | 2151395 | 2152267 | − | 650378029 |

TABLE 6a
Data for Enterobacter, particularly Enterobacter cloacae

| | Scaffold.external. | | |
|---|---|---|---|
| No. | Accession | Scaffold.Name | best_pv |
| 1 | NC_013509 | Edwardsiella tarda EIB202 plasmid pEIB202: NC_013509 | 5.49490970435242e−27 |
| 2 | NC_014107 | Enterobacter cloacae subsp. cloacae ATCC 13047 plasmid | 5.83313344212793e−25 |
| | | pECL_A: NC_014107 | |
| 3 | NC_009838 | Escherichia coli APEC O1 plasmid pAPEC-O1-R: NC_009838 | 5.83313344212793e−25 |
| 4 | NC_009838 | Escherichia coli APEC O1 plasmid pAPEC-O1-R: NC_009838 | 5.83313344212793e−25 |
| 5 | NC_014107 | Enterobacter cloacae subsp. cloacae ATCC 13047 plasmid | 1.25162242820201e−24 |
| | | pECL_A: NC_014107 | |
| 6 | NC_014107 | Enterobacter cloacae subsp. cloacae ATCC 13047 plasmid | 2.31689992231266e−24 |
| | | pECL_A: NC_014107 | |
| 7 | NC_014107 | Enterobacter cloacae subsp. cloacae ATCC 13047 plasmid | 2.46438038993034e−24 |
| | | pECL_A: NC_014107 | |
| 8 | NC_014107 | Enterobacter cloacae subsp. cloacae ATCC 13047 plasmid | 2.46438038993034e−24 |
| | | pECL_A: NC_014107 | |
| 9 | NZ_GG657370 | Citrobacter sp. 30_2 genomic scaffold supercont1.5: | 2.46438038993034e−24 |
| | | NZ_GG657370 | |
| 10 | NZ_GG657370 | Citrobacter sp. 30_2 genomic scaffold supercont1.5: | 1.59357817134779e−23 |
| | | NZ_GG657370 | |
| 11 | NC_009838 | Escherichia coli APEC O1 plasmid pAPEC-O1-R: NC_009838 | 1.59357817134779e−23 |
| 12 | NC_009778 | Enterobacter sakazakii ATCC BAA-894: NC_009778 | 2.83245228849161e−23 |
| 13 | NC_014107 | Enterobacter cloacae subsp. cloacae ATCC 13047 plasmid | 2.83245228849161e−23 |
| | | pECL_A: NC_014107 | |
| 14 | NZ_ADUD01000537 | Escherichia coli MS 196-1 E_coli196-1-1.0_Cont1482.1: | 9.1281268279348e−23 |
| | | NZ_ADUD01000537 | |
| 15 | NC_014121 | Enterobacter cloacae subsp. cloacae ATCC 13047 | 2.16502306009163e−22 |
| | | chromosome: NC_014121 | |
| 16 | NZ_ABFH01000001 | Salmonella enterica subsp. enterica serovar Virchow | 4.49434330590708e−22 |
| | | str. SL491, unfinished sequence: NZ_ABFH01000001 | |
| 17 | NC_004741 | Shigella flexneri 2a str. 2457T: NC_004741 | 1.02679325501045e−21 |
| 18 | NC_014121 | Enterobacter cloacae subsp. cloacae ATCC 13047 | 1.4942758061424e−21 |
| | | chromosome: NC_014121 | |
| 19 | NZ_AFBO01000168 | Klebsiella sp. MS 92-3 K_spMS92-3-1.0_Cont398.10: | 2.33876952186319e−21 |
| | | NZ_AFBO01000168 | |
| 20 | NC_014121 | Enterobacter cloacae subsp. cloacae ATCC 13047 | 7.16913512003583e−16 |
| | | chromosome: NC_014121 | |
| 21 | CP001383 | Shigella flexneri 2002017: CP001383 | 1.0532279235518e−15 |
| 22 | CP001637 | Escherichia coli DH1: CP001637 | 4.34714801916322e−15 |
| 23 | NZ_ADWT01000006 | Escherichia coli MS 124-1 E_coliMS124-1.1.0.1_Cont5.1: | 2.30933700130366e−14 |
| | | NZ_ADWT01000006 | |
| 24 | NZ_ADTR01000359 | Escherichia coli MS 21-1 E_coli21-1-1.0_Cont669.1: | 3.84987338572512e−13 |
| | | NZ_ADTR01000359 | |
| 25 | NC_014121 | Enterobacter cloacae subsp. cloacae ATCC 13047 | 5.47488441522503e−11 |
| | | chromosome: NC_014121 | |
| 26 | NZ_AAJV01000019 | Escherichia coli E22, unfinished sequence: | 9.06569667406974e−10 |
| | | NZ_AAJV01000019 | |
| 27 | FP929040 | Enterobacter cloacae subsp. cloacae NCTC 9394 draft | 1.83557061686134e−09 |
| | | genome.: FP929040 | |
| 28 | FP929040 | Enterobacter cloacae subsp. cloacae NCTC 9394 draft | 3.37768924887661e−09 |
| | | genome.: FP929040 | |
| 29 | FP929040 | Enterobacter cloacae subsp. cloacae NCTC 9394 draft | 5.84222468117604e−09 |
| | | genome.: FP929040 | |
| 30 | NZ_AFHR01000043 | Enterobacter hormaechei ATCC 49162 contig00043: | 8.80996353751187e−09 |
| | | NZ_AFHR01000043 | |
| 31 | FP929040 | Enterobacter cloacae subsp. cloacae NCTC 9394 draft | 1.29388450812614e−08 |
| | | genome.: FP929040 | |
| 32 | FP929040 | Enterobacter cloacae subsp. cloacae NCTC 9394 draft | 1.29388450812614e−08 |
| | | genome.: FP929040 | |
| 33 | FP929040 | Enterobacter cloacae subsp. cloacae NCTC 9394 draft | 1.29388450812614e−08 |
| | | genome.: FP929040 | |
| 34 | NZ_AFHR01000073 | Enterobacter hormaechei ATCC 49162 contig00073: | 1.29388450812614e−08 |
| | | NZ_AFHR01000073 | |
| 35 | NZ_AFHR01000073 | Enterobacter hormaechei ATCC 49162 contig00073: | 1.29388450812614e−08 |
| | | NZ_AFHR01000073 | |
| 36 | NZ_AFHR01000034 | Enterobacter hormaechei ATCC 49162 contig00034: | 1.29388450812614e−08 |
| | | NZ_AFHR01000034 | |
| 37 | NZ_AFHR01000073 | Enterobacter hormaechei ATCC 49162 contig00073: | 2.23051874499664e−08 |
| | | NZ_AFHR01000073 | |
| 38 | FP929040 | Enterobacter cloacae subsp. cloacae NCTC 9394 draft | 2.39066831640169e−08 |
| | | genome.: FP929040 | |
| 39 | NZ_AFHR01000062 | Enterobacter hormaechei ATCC 49162 contig00062: | 2.39066831640169e−08 |
| | | NZ_AFHR01000062 | |
| 40 | NC_014618 | Enterobacter cloacae SCF1 chromosome: NC_014618 | 2.76892470483105e−08 |
| 41 | NC_014618 | Enterobacter cloacae SCF1 chromosome: NC_014618 | 3.01843352491008e−08 |
| 42 | NZ_ABWM01000064 | Enterobacter cancerogenus ATCC 35316, unfinished | 4.40355882800235e−08 |
| | | sequence: NZ_ABWM01000064 | |
| 43 | NC_014121 | Enterobacter cloacae subsp. cloacae ATCC 13047 | 4.44394973624704e−08 |
| | | chromosome: NC_014121 | |
| 44 | NZ_GG657370 | Citrobacter sp. 30_2 genomic scaffold supercont1.5: | 5.11952538533182e−08 |
| | | NZ_GG657370 | |
| 45 | NC_014618 | Enterobacter cloacae SCF1 chromosome: NC_014618 | 5.14762193286233e−08 |
| 46 | NZ_AFHR01000015 | Enterobacter hormaechei ATCC 49162 contig00015: | 5.14762193286233e−08 |
| | | NZ_AFHR01000015 | |
| 47 | FP929040 | Enterobacter cloacae subsp. cloacae NCTC 9394 draft | 5.31046635969439e−08 |
| | | genome.: FP929040 | |
| 48 | FP929040 | Enterobacter cloacae subsp. cloacae NCTC 9394 draft | 5.31046635969439e−08 |
| | | genome.: FP929040 | |
| 49 | FP929040 | Enterobacter cloacae subsp. cloacae NCTC 9394 draft | 5.31046635969439e−08 |
| | | genome.: FP929040 | |
| 50 | FP929040 | Enterobacter cloacae subsp. cloacae NCTC 9394 draft | 5.31046635969439e−08 |
| | | genome.: FP929040 | |

TABLE 6b
Data for Enterobacter, particularly Enterobacter cloacae (continued)

| No. | sign_phenos | sign_phenos_class | best_pheno | best_pheno_class |
|---|---|---|---|---|
| 1 | AZT; CAX; CAZ; CFT; CP; CPE; CRM; ETP; GM; LVX; P/T; | aminoglycoside; fluoroquinolone; lactam; | T/S | other |
| | TO; T/S | other | | |
| 2 | AZT; CAX; CAZ; CFT; CP; CPE; CRM; GM; LVX; P/T; | aminoglycoside; fluoroquinolone; lactam; | T/S | other |
| | TO; T/S | other | | |
| 3 | AZT; CAX; CAZ; CFT; CP; CPE; CRM; GM; LVX; P/T; | aminoglycoside; fluoroquinolone; lactam; | T/S | other |
| | TO; T/S | other | | |
| 4 | AZT; CAX; CAZ; CFT; CP; CPE; CRM; GM; LVX; P/T; | aminoglycoside; fluoroquinolone; lactam; | T/S | other |
| | TO; T/S | other | | |
| 5 | AZT; CAX; CAZ; CFT; CP; CPE; CRM; GM; LVX; P/T; | aminoglycoside; fluoroquinolone; lactam; | T/S | other |
| | TO; T/S | other | | |
| 6 | AZT; CAX; CAZ; CFT; CP; CPE; ETP; GM; LVX; P/T; | aminoglycoside; fluoroquinolone; lactam; | T/S | other |
| | TO; T/S | other | | |
| 7 | AZT; CAX; CAZ; CFT; CP; CPE; GM; LVX; TO; T/S | aminoglycoside; fluoroquinolone; lactam; | T/S | other |
| | | other | | |
| 8 | AZT; CAX; CAZ; CFT; CP; CPE; GM; LVX; TO; T/S | aminoglycoside; fluoroquinolone; lactam; | T/S | other |
| | | other | | |
| 9 | AZT; CAX; CAZ; CFT; CP; CPE; CRM; GM; LVX; TO; T/S | aminoglycoside; fluoroquinolone; lactam; | T/S | other |
| | | other | | |
| 10 | AZT; CAX; CAZ; CFT; CP; CPE; CRM; GM; LVX; P/T; | aminoglycoside; fluoroquinolone; lactam; | T/S | other |
| | TO; T/S | other | | |
| 11 | AZT; CAX; CAZ; CFT; CP; CPE; GM; LVX; TO; T/S | aminoglycoside; fluoroquinolone; lactam; | T/S | other |
| | | other | | |
| 12 | AZT; CAX; CAZ; CFT; CP; CPE; CRM; GM; LVX; TO; T/S | aminoglycoside; fluoroquinolone; lactam; | T/S | other |
| | | other | | |
| 13 | AZT; CAX; CAZ; CFT; CP; CPE; GM; LVX; TO; T/S | aminoglycoside; fluoroquinolone; lactam; | T/S | other |
| | | other | | |
| 14 | AZT; CAX; CAZ; CFT; CP; CPE; CRM; ETP; GM; LVX; P/T; | aminoglycoside; fluoroquinolone; lactam; | GM | aminoglycoside |
| | TO; T/S | other | | |
| 15 | AZT; CAX; CAZ; CFT; CP; CPE; CRM; ETP; GM; LVX; P/T; | aminoglycoside; fluoroquinolone; lactam; | T/S | other |
| | TO; T/S | other | | |
| 16 | AZT; CAX; CAZ; CFT; CP; CPE; CRM; ETP; GM; LVX; P/T; | aminoglycoside; fluoroquinolone; lactam; | GM | aminoglycoside |
| | TO; T/S | other | | |
| 17 | AZT; CAX; CAZ; CFT; CP; CPE; CRM; GM; LVX; P/T; | aminoglycoside; fluoroquinolone; lactam; | GM | aminogiycoside |
| | TO; T/S | other | | |
| 18 | AZT; CAX; CAZ; CFT; CP; CPE; CRM; ETP; GM; LVX; P/T; | aminoglycoside; fluoroquinolone; lactam; | TO | aminogiycoside |
| | TO; T/S | other | | |
| 19 | AZT; CAX; CAZ; CFT; CP; CPE; CRM; ETP; GM; LVX; P/T; | aminoglycoside; fluoroquinolone; lactam; | T/S | other |
| | TO; T/S | other | | |
| 20 | AZT; CAX; CAZ; CFT; CP; CPE; CRM; GM; LVX; P/T; | aminoglycoside; fluoroquinolone; lactam; | TO | aminogiycoside |
| | TO; T/S | other | | |
| 21 | AZT; CAX; CAZ; CFT; CP; CPE; GM; LVX; P/T; TO; T/S | aminoglycoside; fluoroquinolone; lactam; | T/S | other |
| | | other | | |
| 22 | AZT; CAX; CAZ; CFT; CP; GM; LVX; P/T; TO; T/S | aminoglycoside; fluoroquinolone; lactam; | T/S | other |
| | | other | | |
| 23 | AZT; CAX; CAZ; CFT; CP; CPE; GM; LVX; P/T; TO; T/S | aminoglycoside; fluoroquinolone; lactam; | GM | aminogiycoside |
| | | other | | |
| 24 | AZT; CAX; CAZ; CFT; CP; CPE; GM; LVX; P/T; TO; T/S | aminoglycoside; fluoroquinolone; lactam; | GM | aminogiycoside |
| | | other | | |
| 25 | AZT; CAX; CAZ; CFT; CP; CPE; ETP; GM; LVX; P/T; | aminoglycoside; fluoroquinolone; lactam; | TO | aminogiycoside |
| | TO; T/S | other | | |
| 26 | AZT; CAX; CAZ; CFT; CP; CPE; ETP; GM; LVX; TO; T/S | aminoglycoside; fluoroquinolone; lactam; | TO | aminogiycoside |
| | | other | | |
| 27 | AZT; CAX; CAZ; CFT; CP; CPE; GM; LVX; P/T; TO; T/S | aminoglycoside; fluoroquinolone; lactam; | CPE | lactam |
| | | other | | |
| 28 | AZT; CAX; CAZ; CFT; CPE; GM; LVX; P/T; TO | aminoglycoside; fluoroquinolone; lactam | CPE | lactam |
| 29 | AZT; CAX; CAZ; CFT; CPE; GM; LVX; P/T; TO; T/S | aminoglycoside; fluoroquinolone; lactam; | CPE | lactam |
| | | other | | |
| 30 | AZT; CAZ; CFT; CP; CPE; GM; LVX; P/T; TO; T/S | aminoglycoside; fluoroquinolone; lactam; | CPE | lactam |
| | | other | | |
| 31 | AZT; CAX; CAZ; CPE; GM; LVX; P/T; TO; T/S | aminoglycoside; fluoroquinolone; lactam; | CPE | lactam |
| | | other | | |
| 32 | AZT; CAX; CAZ; CPE; GM; LVX; P/T; TO; T/S | aminoglycoside; fluoroquinolone; lactam; | CPE | lactam |
| | | other | | |
| 33 | AZT; CAX; CAZ; CPE; GM; LVX; P/T; TO; T/S | aminoglycoside; fluoroquinolone; lactam; | CPE | lactam |
| | | other | | |
| 34 | AZT; CAX; CAZ; CPE; GM; LVX; P/T; TO; T/S | aminoglycoside; fluoroquinolone; lactam; | CPE | lactam |
| | | other | | |
| 35 | AZT; CAX; CAZ; CPE; GM; LVX; P/T; TO; T/S | aminoglycoside; fluoroquinolone; lactam; | CPE | lactam |
| | | other | | |
| 36 | AZT; CAX; CAZ; CPE; GM; LVX; P/T; TO; T/S | aminoglycoside; fluoroquinolone; lactam; | CPE | lactam |
| | | other | | |
| 37 | AZT; CAX; CAZ; CPE; GM; LVX; P/T; TO; T/S | aminoglycoside; fluoroquinolone; lactam; | CPE | lactam |
| | | other | | |
| 38 | CP; CPE; GM; LVX; TO; T/S | aminoglycoside; fluoroquinolone; lactam; | CPE | lactam |
| | | other | | |
| 39 | CP; CPE; GM; LVX; TO; T/S | aminoglycoside; fluoroquinolone; lactam; | CPE | lactam |
| | | other | | |
| 40 | AZT; CAX; CAZ; CFT; CRM; GM; P/T; TO; T/S | aminoglycoside; lactam; other | T/S | other |
| 41 | AZT; CAX; CAZ; CFT; CP; CPE; ETP; GM; LVX; P/T; | aminoglycoside; fluoroquinolone; lactam; | CPE | lactam |
| | TO; T/S | other | | |
| 42 | CP; CPE; GM; LVX; TO; T/S | aminoglycoside; fluoroquinolone; lactam; | CPE | lactam |
| | | other | | |
| 43 | AZT; CAX; CAZ; CPE; GM; LVX; P/T; TO; T/S | aminoglycoside; fluoroquinolone; lactam; | CPE | lactam |
| | | other | | |
| 44 | AZT; CAX; CAZ; CFT; CP; GM; LVX; P/T; TO; T/S | aminoglycoside; fluoroquinolone; lactam; | T/S | other |
| | | other | | |
| 45 | CAX; CAZ; CPE; GM; LVX; P/T; TO; T/S | aminoglycoside; fluoroquinolone; lactam; | CPE | lactam |
| | | other | | |
| 46 | CP; CPE; GM; LVX; TO; T/S | aminoglycoside; fluoroquinolone; lactam; | CPE | lactam |
| | | other | | |
| 47 | AZT; CAX; CAZ; CPE; GM; LVX; P/T; TO; T/S | aminoglycoside; fluoroquinolone; lactam; | CPE | lactam |
| | | other | | |
| 48 | AZT; CAX; CAZ; CPE; GM; LVX; P/T; TO; T/S | aminoglycoside; fluoroquinolone; lactam; | CPE | lactam |
| | | other | | |
| 49 | AZT; CAX; CAZ; CPE; GM; LVX; P/T; TO; T/S | aminoglycoside; fluoroquinolone; lactam; | CPE | lactam |
| | | other | | |
| 50 | AZT; CAX; CAZ; CPE; GM; LVX; P/T; TO; T/S | aminoglycoside; fluoroquinolone; lactam; | CPE | lactam |
| | | other | | |

TABLE 6c
Data for Enterobacter, particularly Enterobacter cloacae (continued)

| No. | num_aminoglycoside | num_fluoroquinolone | num_lactam | num_other |
|---|---|---|---|---|
| 1 | 2 | 2 | 8 | 1 |
| 2 | 2 | 2 | 7 | 1 |
| 3 | 2 | 2 | 7 | 1 |
| 4 | 2 | 2 | 7 | 1 |
| 5 | 2 | 2 | 7 | 1 |
| 6 | 2 | 2 | 7 | 1 |
| 7 | 2 | 2 | 5 | 1 |
| 8 | 2 | 2 | 5 | 1 |
| 9 | 2 | 2 | 6 | 1 |
| 10 | 2 | 2 | 7 | 1 |
| 11 | 2 | 2 | 5 | 1 |
| 12 | 2 | 2 | 6 | 1 |
| 13 | 2 | 2 | 5 | 1 |
| 14 | 2 | 2 | 8 | 1 |
| 15 | 2 | 2 | 8 | 1 |
| 16 | 2 | 2 | 8 | 1 |
| 17 | 2 | 2 | 7 | 1 |
| 18 | 2 | 2 | 8 | 1 |
| 19 | 2 | 2 | 8 | 1 |
| 20 | 2 | 2 | 7 | 1 |
| 21 | 2 | 2 | 6 | 1 |
| 22 | 2 | 2 | 5 | 1 |
| 23 | 2 | 2 | 6 | 1 |
| 24 | 2 | 2 | 6 | 1 |
| 25 | 2 | 2 | 7 | 1 |
| 26 | 2 | 2 | 6 | 1 |
| 27 | 2 | 2 | 6 | 1 |
| 28 | 2 | 1 | 6 | 0 |
| 29 | 2 | 1 | 6 | 1 |
| 30 | 2 | 2 | 5 | 1 |
| 31 | 2 | 1 | 5 | 1 |
| 32 | 2 | 1 | 5 | 1 |
| 33 | 2 | 1 | 5 | 1 |
| 34 | 2 | 1 | 5 | 1 |
| 35 | 2 | 1 | 5 | 1 |
| 36 | 2 | 1 | 5 | 1 |
| 37 | 2 | 1 | 5 | 1 |
| 38 | 2 | 2 | 1 | 1 |
| 39 | 2 | 2 | 1 | 1 |
| 40 | 2 | 0 | 6 | 1 |
| 41 | 2 | 2 | 7 | 1 |
| 42 | 2 | 2 | 1 | 1 |
| 43 | 2 | 1 | 5 | 1 |
| 44 | 2 | 2 | 5 | 1 |
| 45 | 2 | 1 | 4 | 1 |
| 46 | 2 | 2 | 1 | 1 |
| 47 | 2 | 1 | 5 | 1 |
| 48 | 2 | 1 | 5 | 1 |
| 49 | 2 | 1 | 5 | 1 |
| 50 | 2 | 1 | 5 | 1 |

TABLE 6d
Data for Enterobacter, particularly Enterobacter cloacae (continued)

| No. | AZT_pv_adj | CAX_pv_adj | CAZ_pv_adj | CFT_pv_adj | CP_pv_adj |
|---|---|---|---|---|---|
| 1 | 3.58E−10 | 7.39E−09 | 2.80E−11 | 3.62E−09 | 5.27E−08 |
| 2 | 4.06E−06 | 7.65E−06 | 8.35E−07 | 8.00E−07 | 3.72E−07 |
| 3 | 4.06E−06 | 7.65E−06 | 8.35E−07 | 8.00E−07 | 3.72E−07 |
| 4 | 4.06E−06 | 7.65E−06 | 8.35E−07 | 8.00E−07 | 3.72E−07 |
| 5 | 8.70E−07 | 8.75E−06 | 5.21E−07 | 5.80E−07 | 1.18E−06 |
| 6 | 1.92E−12 | 2.08E−13 | 5.48E−12 | 1.92E−12 | 4.74E−09 |
| 7 | 2.20E−05 | 4.05E−05 | 4.94E−06 | 4.85E−06 | 7.75E−07 |
| 8 | 2.20E−05 | 4.05E−05 | 4.94E−06 | 4.85E−06 | 7.75E−07 |
| 9 | 6.62E−06 | 1.21E−05 | 1.34E−06 | 1.27E−06 | 3.72E−07 |
| 10 | 3.70E−06 | 6.73E−06 | 7.48E−07 | 7.08E−07 | 2.65E−06 |
| 11 | 3.46E−05 | 6.07E−05 | 7.99E−06 | 7.84E−06 | 7.16E−07 |
| 12 | 6.62E−06 | 1.21E−05 | 1.34E−06 | 1.27E−06 | 3.14E−06 |
| 13 | 2.20E−05 | 4.05E−05 | 4.94E−06 | 4.85E−06 | 7.75E−07 |
| 14 | 2.41E−09 | 3.66E−10 | 2.89E−10 | 1.33E−09 | 1.31E−11 |
| 15 | 6.79E−08 | 4.49E−08 | 1.13E−08 | 3.99E−08 | 4.19E−12 |
| 16 | 3.51E−09 | 1.67E−09 | 8.09E−10 | 8.35E−10 | 5.65E−12 |
| 17 | 3.11E−11 | 6.47E−11 | 7.01E−12 | 5.47E−11 | 1.53E−06 |
| 18 | 4.36E−12 | 6.39E−12 | 5.85E−13 | 5.48E−12 | 5.70E−07 |
| 19 | 6.79E−08 | 4.49E−08 | 1.13E−08 | 3.99E−08 | 3.61E−11 |
| 20 | 5.39E−09 | 1.23E−08 | 5.84E−09 | 6.70E−09 | 5.19E−07 |
| 21 | 3.36E−07 | 5.25E−07 | 5.19E−07 | 3.74E−06 | 3.91E−05 |
| 22 | 4.53E−07 | 8.07E−07 | 7.17E−07 | 6.01E−06 | 7.16E−05 |
| 23 | 1.62E−07 | 3.02E−07 | 2.83E−08 | 5.65E−08 | 9.46E−05 |
| 24 | 8.58E−09 | 1.75E−08 | 5.92E−08 | 2.01E−07 | 7.82E−07 |
| 25 | 5.28E−06 | 5.19E−07 | 1.32E−06 | 7.50E−07 | 1.27E−05 |
| 26 | 3.71E−05 | 2.06E−06 | 1.56E−05 | 9.73E−06 | 1.34E−04 |
| 27 | 2.41E−04 | 8.91E−05 | 8.91E−05 | 4.87E−04 | 5.72E−04 |
| 28 | 2.12E−03 | 7.75E−04 | 1.61E−03 | 5.63E−03 | 2.33E−02 |
| 29 | 3.60E−03 | 1.44E−03 | 1.46E−03 | 6.84E−03 | 1.58E−02 |
| 30 | 1.63E−03 | 1.30E−02 | 1.26E−03 | 9.88E−03 | 1.03E−03 |
| 31 | 8.73E−03 | 1.90E−03 | 3.60E−03 | 1.54E−02 | 2.18E−02 |
| 32 | 8.73E−03 | 1.90E−03 | 3.60E−03 | 1.54E−02 | 2.18E−02 |
| 33 | 8.73E−03 | 1.90E−03 | 3.60E−03 | 1.54E−02 | 2.18E−02 |
| 34 | 8.73E−03 | 1.90E−03 | 3.60E−03 | 1.54E−02 | 2.18E−02 |
| 35 | 8.73E−03 | 1.90E−03 | 3.60E−03 | 1.54E−02 | 2.18E−02 |
| 36 | 8.73E−03 | 1.90E−03 | 3.60E−03 | 1.54E−02 | 2.18E−02 |
| 37 | 9.06E−03 | 2.62E−03 | 4.92E−03 | 1.99E−02 | 2.22E−02 |
| 38 | 3.58E−02 | 1.04E−02 | 1.75E−02 | 5.31E−02 | 2.20E−05 |
| 39 | 5.33E−02 | 1.78E−02 | 2.85E−02 | 7.63E−02 | 6.85E−05 |
| 40 | 8.52E−05 | 3.90E−05 | 6.01E−06 | 2.49E−05 | 1.29E−02 |
| 41 | 4.11E−06 | 7.41E−04 | 4.26E−05 | 1.08E−03 | 6.16E−05 |
| 42 | 4.35E−02 | 1.36E−02 | 2.23E−02 | 6.48E−02 | 2.37E−05 |
| 43 | 8.79E−03 | 2.56E−03 | 4.80E−03 | 1.96E−02 | 2.95E−02 |
| 44 | 5.44E−03 | 1.03E−03 | 6.23E−04 | 1.01E−03 | 1.45E−04 |
| 45 | 1.49E−02 | 4.69E−03 | 8.56E−03 | 3.09E−02 | 3.86E−02 |
| 46 | 2.22E−01 | 6.69E−02 | 1.35E−01 | 3.01E−01 | 6.26E−04 |
| 47 | 8.87E−03 | 1.93E−03 | 3.69E−03 | 1.56E−02 | 3.05E−02 |
| 48 | 8.87E−03 | 1.93E−03 | 3.69E−03 | 1.56E−02 | 3.05E−02 |
| 49 | 8.87E−03 | 1.93E−03 | 3.69E−03 | 1.56E−02 | 3.05E−02 |
| 50 | 8.87E−03 | 1.93E−03 | 3.69E−03 | 1.56E−02 | 3.05E−02 |

TABLE 6e
Data for Enterobacter, particularly
Enterobacter cloacae (continued)

| No. | CPE_pv_adj | CRM_pv_adj | ETP_pv_adj | GM_pv_adj |
|---|---|---|---|---|
| 1 | 2.76E−09 | 1.20E−03 | 1.29E−04 | 3.48E−19 |
| 2 | 2.95E−05 | 2.74E−03 | 5.44E−02 | 5.95E−17 |
| 3 | 2.95E−05 | 2.74E−03 | 5.44E−02 | 5.95E−17 |
| 4 | 2.95E−05 | 2.74E−03 | 5.44E−02 | 5.95E−17 |
| 5 | 5.40E−05 | 2.87E−03 | 9.20E−02 | 6.93E−16 |
| 6 | 3.27E−08 | 3.20E−02 | 6.76E−03 | 1.07E−19 |
| 7 | 6.14E−05 | 1.06E−02 | 5.77E−02 | 2.51E−16 |
| 8 | 6.14E−05 | 1.06E−02 | 5.77E−02 | 2.51E−16 |
| 9 | 5.81E−05 | 2.77E−03 | 7.62E−02 | 4.00E−16 |
| 10 | 5.02E−05 | 3.99E−03 | 3.88E−02 | 2.55E−15 |
| 11 | 5.72E−05 | 1.10E−02 | 5.64E−02 | 1.59E−16 |
| 12 | 5.81E−05 | 6.94E−03 | 4.04E−02 | 4.15E−15 |
| 13 | 1.93E−05 | 1.06E−02 | 5.77E−02 | 2.51E−16 |
| 14 | 5.33E−09 | 5.60E−04 | 8.61E−04 | 9.13E−23 |
| 15 | 1.62E−07 | 1.89E−03 | 7.13E−04 | 4.13E−22 |
| 16 | 1.55E−08 | 1.01E−03 | 1.04E−03 | 4.49E−22 |
| 17 | 5.31E−08 | 9.22E−03 | 1.04E−02 | 1.03E−21 |
| 18 | 1.37E−08 | 1.77E−03 | 7.24E−03 | 1.52E−21 |
| 19 | 3.31E−08 | 1.89E−03 | 6.74E−03 | 5.26E−21 |
| 20 | 5.79E−05 | 2.43E−03 | 5.85E−02 | 1.07E−14 |
| 21 | 8.87E−03 | 1.21E−02 | 2.44E−01 | 2.97E−08 |
| 22 | 1.76E−02 | 1.63E−02 | 2.41E−01 | 7.76E−08 |
| 23 | 2.82E−06 | 7.01E−02 | 5.22E−02 | 2.31E−14 |
| 24 | 3.31E−04 | 2.06E−02 | 1.04E−02 | 3.85E−13 |
| 25 | 1.65E−04 | 1.14E−01 | 1.77E−03 | 5.27E−08 |
| 26 | 1.92E−04 | 5.27E−02 | 1.45E−03 | 1.24E−08 |
| 27 | 1.84E−09 | 3.12E−02 | 9.47E−02 | 3.86E−04 |
| 28 | 3.38E−09 | 2.11E−01 | 1.66E−01 | 6.74E−04 |
| 29 | 5.84E−09 | 6.96E−02 | 2.65E−01 | 9.71E−04 |
| 30 | 8.81E−09 | 1.75E−01 | 1.27E−01 | 2.57E−04 |
| 31 | 1.29E−08 | 8.58E−02 | 3.28E−01 | 1.48E−03 |
| 32 | 1.29E−08 | 8.58E−02 | 3.28E−01 | 1.48E−03 |
| 33 | 1.29E−08 | 8.58E−02 | 3.28E−01 | 1.48E−03 |
| 34 | 1.29E−08 | 8.58E−02 | 3.28E−01 | 1.48E−03 |
| 35 | 1.29E−08 | 8.58E−02 | 3.28E−01 | 1.48E−03 |
| 36 | 1.29E−08 | 8.58E−02 | 3.28E−01 | 1.48E−03 |
| 37 | 2.23E−08 | 8.52E−02 | 3.28E−01 | 1.51E−03 |
| 38 | 2.39E−08 | 4.38E−01 | 5.64E−02 | 4.16E−03 |
| 39 | 2.39E−08 | 4.38E−01 | 5.64E−02 | 4.16E−03 |
| 40 | 1.69E−01 | 6.82E−04 | 7.60E−01 | 2.98E−04 |
| 41 | 3.02E−08 | 3.74E−02 | 3.81E−04 | 1.38E−04 |
| 42 | 4.40E−08 | 3.77E−01 | 5.72E−02 | 4.38E−03 |
| 43 | 4.44E−08 | 6.75E−02 | 3.31E−01 | 2.17E−03 |
| 44 | 2.31E−02 | 4.84E−02 | 6.10E−02 | 1.15E−06 |
| 45 | 5.15E−08 | 8.55E−02 | 2.60E−01 | 3.19E−03 |
| 46 | 5.15E−08 | 7.80E−02 | 4.73E−01 | 1.13E−03 |
| 47 | 5.31E−08 | 1.08E−01 | 2.67E−01 | 2.37E−03 |
| 48 | 5.31E−08 | 1.08E−01 | 2.67E−01 | 2.37E−03 |
| 49 | 5.31E−08 | 1.08E−01 | 2.67E−01 | 2.37E−03 |
| 50 | 5.31E−08 | 1.08E−01 | 2.67E−01 | 2.37E−03 |

TABLE 6f
Data for Enterobacter, particularly
Enterobacter cloacae (continued)

| No. | LVX_pv_adj | P/T_pv_adj | TO_pv_adj | T/S_pv_adj |
|---|---|---|---|---|
| 1 | 8.81E−09 | 1.52E−04 | 2.06E−19 | 5.49E−27 |
| 2 | 2.74E−08 | 6.34E−03 | 2.69E−20 | 5.83E−25 |
| 3 | 2.74E−08 | 6.34E−03 | 2.69E−20 | 5.83E−25 |
| 4 | 2.74E−08 | 6.34E−03 | 2.69E−20 | 5.83E−25 |
| 5 | 5.07E−07 | 6.25E−03 | 9.93E−19 | 1.25E−24 |
| 6 | 1.21E−11 | 4.05E−05 | 5.70E−21 | 2.32E−24 |
| 7 | 5.15E−08 | 1.58E−02 | 1.59E−19 | 2.46E−24 |
| 8 | 5.15E−08 | 1.58E−02 | 1.59E−19 | 2.46E−24 |
| 9 | 7.06E−08 | 1.10E−02 | 1.73E−19 | 2.46E−24 |
| 10 | 3.37E−07 | 8.08E−03 | 1.06E−18 | 1.59E−23 |
| 11 | 4.09E−08 | 2.07E−02 | 9.23E−20 | 1.59E−23 |
| 12 | 3.72E−07 | 1.10E−02 | 1.95E−18 | 2.83E−23 |
| 13 | 5.15E−08 | 1.58E−02 | 1.59E−19 | 2.83E−23 |
| 14 | 1.31E−11 | 2.13E−07 | 5.43E−22 | 1.85E−22 |
| 15 | 4.19E−12 | 8.40E−07 | 8.04E−22 | 2.17E−22 |
| 16 | 5.65E−12 | 5.70E−07 | 2.63E−21 | 1.03E−21 |
| 17 | 1.00E−08 | 4.60E−04 | 1.44E−21 | 4.11E−18 |
| 18 | 2.49E−09 | 1.68E−04 | 1.49E−21 | 4.99E−18 |
| 19 | 4.19E−12 | 8.40E−07 | 7.92E−21 | 2.34E−21 |
| 20 | 6.44E−09 | 2.28E−04 | 7.17E−16 | 1.02E−15 |
| 21 | 8.28E−05 | 6.44E−04 | 3.80E−10 | 1.05E−15 |
| 22 | 1.82E−04 | 9.24E−04 | 1.96E−09 | 4.35E−15 |
| 23 | 1.55E−05 | 1.40E−04 | 3.69E−14 | 6.50E−11 |
| 24 | 7.82E−07 | 1.61E−04 | 8.30E−12 | 1.21E−11 |
| 25 | 3.34E−06 | 3.34E−03 | 5.47E−11 | 4.91E−08 |
| 26 | 6.31E−06 | 1.70E−02 | 9.07E−10 | 5.12E−08 |
| 27 | 2.79E−05 | 2.12E−03 | 1.68E−04 | 4.44E−04 |
| 28 | 2.35E−03 | 8.21E−03 | 2.41E−03 | 3.78E−02 |
| 29 | 1.41E−03 | 2.25E−03 | 9.05E−04 | 1.74E−03 |
| 30 | 1.97E−05 | 1.77E−03 | 8.04E−05 | 5.50E−04 |
| 31 | 2.08E−03 | 5.50E−03 | 1.36E−03 | 3.40E−03 |
| 32 | 2.08E−03 | 5.50E−03 | 1.36E−03 | 3.40E−03 |
| 33 | 2.08E−03 | 5.50E−03 | 1.36E−03 | 3.40E−03 |
| 34 | 2.08E−03 | 5.50E−03 | 1.36E−03 | 3.40E−03 |
| 35 | 2.08E−03 | 5.50E−03 | 1.36E−03 | 3.40E−03 |
| 36 | 2.08E−03 | 5.50E−03 | 1.36E−03 | 3.40E−03 |
| 37 | 2.10E−03 | 7.39E−03 | 1.42E−03 | 3.42E−03 |
| 38 | 1.40E−06 | 4.00E−02 | 2.39E−03 | 8.45E−04 |
| 39 | 5.74E−06 | 7.03E−02 | 2.39E−03 | 8.45E−04 |
| 40 | 1.29E−02 | 8.60E−03 | 1.87E−05 | 2.77E−08 |
| 41 | 6.73E−06 | 8.68E−06 | 4.49E−05 | 2.53E−04 |
| 42 | 1.52E−06 | 4.87E−02 | 2.44E−03 | 8.72E−04 |
| 43 | 3.07E−03 | 5.47E−03 | 1.99E−03 | 2.25E−03 |
| 44 | 1.45E−04 | 6.88E−03 | 4.69E−06 | 5.12E−08 |
| 45 | 3.22E−03 | 9.52E−03 | 2.86E−03 | 3.22E−03 |
| 46 | 6.11E−05 | 1.82E−01 | 2.53E−04 | 3.05E−04 |
| 47 | 3.31E−03 | 5.73E−03 | 2.11E−03 | 5.16E−03 |
| 48 | 3.31E−03 | 5.73E−03 | 2.11E−03 | 5.16E−03 |
| 49 | 3.31E−03 | 5.73E−03 | 2.11E−03 | 5.16E−03 |
| 50 | 3.31E−03 | 5.73E−03 | 2.11E−03 | 5.16E−03 |

TABLE 6g
Data for Enterobacter, particularly Enterobacter cloacae (continued)

| No. | Locus.Tag | Gene.Symbol | GenBank.Accession | Chromosome |
|---|---|---|---|---|
| 1 | ETAE_p041 | folP | YP_003297635 | plasmid pEIB202 |
| 2 | ECL_A197 | | YP_003602692 | plasmid pECL_A |
| 3 | APECO1_O1R60 | terY1 | YP_001481413 | plasmid pAPEC-O1-R |
| 4 | APECO1_O1R58 | terY2 | YP_001481411 | plasmid pAPEC-O1-R |
| 5 | ECL_A215 | | YP_003602710 | plasmid pECL_A |
| 6 | ECL_A245 | | YP_003602738 | plasmid pECL_A |
| 7 | ECL_A211 | | YP_003602706 | plasmid pECL_A |
| 8 | ECL_A213 | | YP_003602708 | plasmid pECL_A |
| 9 | CSAG_04328 | | ZP_04559059 | |
| 10 | CSAG_04340 | | ZP_04559071 | |
| 11 | APECO1_O1R72 | terD | YP_001481425 | plasmid pAPEC-O1-R |
| 12 | ESA_01791 | | YP_001437881 | |
| 13 | ECL_A210 | | YP_003602705 | plasmid pECL_A |
| 14 | HMPREF9551_04611 | | ZP_07191964 | |
| 15 | ECL_03822 | merP | YP_003614305 | |
| 16 | Salmoentericaenterica_010100000105 | | ZP_02702049 | |
| 17 | S2707 | parA | NP_838057 | |
| 18 | ECL_03815 | | YP_003614298 | |
| 19 | HMPREF9538_01300 | | ZP_08303641 | |
| 20 | ECL_00479 | | YP_003610994 | |
| 21 | SFxv_17317 | | ADA73942 | |
| 22 | EcDH1_2078 | | ACX39734 | |
| 23 | HMPREF9347_01086 | | ZP_07208640 | |
| 24 | HMPREF9530_03894 | | ZP_07153755 | |
| 25 | ECL_00391 | | YP_003610906 | |
| 26 | EcolE2_01002790 | | ZP_00728858 | |
| 27 | ENC_13410 | | CBK85143 | |
| 28 | ENC_03420 | | CBK84384 | |
| 29 | ENC_31170 | | CBK86512 | |
| 30 | HMPREF9086_2435 | | ZP_08498173 | |
| 31 | ENC_11900 | | CBK85029 | |
| 32 | ENC_02650 | | CBK84321 | |
| 33 | ENC_02700 | | CBK84325 | |
| 34 | HMPREF9086_4455 | amsH2 | ZP_08500191 | |
| 35 | HMPREF9086_4454 | yccY2 | ZP_08500190 | |
| 36 | HMPREF9086_2100 | yjdF | ZP_08497838 | |
| 37 | HMPREF9086_4460 | ligA2 | ZP_08500196 | |
| 38 | ENC_28850 | | CBK86326 | |
| 39 | HMPREF9086_3524 | gatAX | ZP_08499260 | |
| 40 | Entcl_2219 | | YP_003941757 | |
| 41 | Entcl_2207 | | YP_003941745 | |
| 42 | ENTCAN_03923 | | ZP_03284103 | |
| 43 | ECL_01132 | | YP_003611642 | |
| 44 | CSAG_04209 | | ZP_04558940 | |
| 45 | Entcl_0777 | | YP_003940336 | |
| 46 | HMPREF9086_0855 | | ZP_08496597 | |
| 47 | ENC_21030 | | CBK85719 | |
| 48 | ENC_20990 | | CBK85716 | |
| 49 | ENC_21000 | | CBK85717 | |
| 50 | ENC_21040 | | CBK85720 | |

TABLE 6h
Data for Enterobacter, particularly
Enterobacter cloacae (continued)

| No. | Start.Coord | End.Coord | Strand | Scaffold.ID |
|---|---|---|---|---|
| 1 | 32101 | 32916 | − | 646311959 |
| 2 | 142295 | 142936 | − | 646564617 |
| 3 | 68792 | 69511 | − | 640753093 |
| 4 | 67490 | 68131 | − | 640753093 |
| 5 | 156077 | 157318 | + | 646564617 |
| 6 | 176747 | 177670 | − | 646564617 |
| 7 | 153338 | 154378 | + | 646564617 |
| 8 | 155073 | 155648 | + | 646564617 |
| 9 | 377133 | 378173 | − | 646206736 |
| 10 | 388284 | 389441 | + | 646206736 |
| 11 | 80263 | 80841 | + | 640753093 |
| 12 | 1731242 | 1732198 | − | 640753067 |
| 13 | 152860 | 153315 | + | 646564617 |
| 14 | 97 | 531 | − | 648293053 |
| 15 | 3908948 | 3909223 | + | 646564624 |
| 16 | 16271 | 16636 | − | 641778223 |
| 17 | 2602155 | 2602892 | − | 637000219 |
| 18 | 3903410 | 3903712 | + | 646564624 |
| 19 | 6404 | 6640 | + | 651333085 |
| 20 | 482851 | 484329 | − | 646564624 |
| 21 | 1636971 | 1637258 | − | 646862363 |
| 22 | 2232606 | 2232845 | + | 646862383 |
| 23 | 2726 | 5692 | − | 648294279 |
| 24 | 1918 | 3231 | − | 648290583 |
| 25 | 409807 | 410283 | + | 646564624 |
| 26 | 14395 | 15375 | + | 638358747 |
| 27 | 1397946 | 1398188 | − | 650378029 |
| 28 | 360699 | 361856 | + | 650378029 |
| 29 | 3151035 | 3151685 | − | 650378029 |
| 30 | 192614 | 193519 | + | 651335147 |
| 31 | 1250898 | 1252163 | + | 650378029 |
| 32 | 274155 | 276332 | − | 650378029 |
| 33 | 280790 | 281458 | − | 650378029 |
| 34 | 111547 | 112680 | − | 651335177 |
| 35 | 111116 | 111559 | − | 651335177 |
| 36 | 33364 | 34074 | + | 651335138 |
| 37 | 117314 | 119053 | − | 651335177 |
| 38 | 2904606 | 2905577 | − | 650378029 |
| 39 | 8440 | 9756 | − | 651335166 |
| 40 | 2349542 | 2349967 | + | 649633020 |
| 41 | 2334593 | 2335594 | − | 649633020 |
| 42 | 28272 | 29567 | − | 643006662 |
| 43 | 1168855 | 1169388 | + | 646564624 |
| 44 | 254005 | 255187 | − | 646206736 |
| 45 | 812618 | 813094 | + | 649633020 |
| 46 | 13947 | 15560 | − | 651335119 |
| 47 | 2148896 | 2151391 | + | 650378029 |
| 48 | 2145171 | 2145458 | + | 650378029 |
| 49 | 2145486 | 2146736 | + | 650378029 |
| 50 | 2151395 | 2152267 | − | 650378029 |

### Example 4:

### Escherichia, particularly E. coli

[0256] The procedure was carried out as in Example 1, except that the following microorganisms were used:

[0257] Bacterial Strains

[0258] The inventors selected 1144 E.coli strains from the microbiology strain collection at Siemens Healthcare Diagnostics (West Sacramento, Calif.) for susceptibility testing and whole genome sequencing.

[0259] From MetaRef, 318 centroids of E.coli were used as reference sequences.

[0260] The results for E.coli are shown in Tables 7 (corresponding to Table 1) and 8 (corresponding to Table 2).

TABLE 7a
Data for Escherichia, particularly E. coli

| | Scaffold.External. | | |
|---|---|---|---|
| No. | Accession | Scaffold.Name | best_pv |
| 1 | NC_011083 | Salmonella enterica subsp. enterica serovar Heidelberg str. | 3.5041948925527e−207 |
| | | SL476: NC_011083 | |
| 2 | NZ_AAJT01000012 | Escherichia coli B7A, unfinished sequence: NZ_AAJT01000012 | 1.62252621621877e−119 |
| 3 | NZ_ADWV01000045 | Escherichia coli MS 107-1 E_coliMS107-1-1.0.1_Cont44.1: | 6.24750842070913e−97 |
| | | NZ_ADWV01000045 | |
| 4 | NC_009651 | Klebsiella pneumoniae subsp. pneumoniae MGH 78578 plasmid | 8.77735582031733e−96 |
| | | pKPN5: NC_009651 | |
| 5 | NZ_ADUB01000261 | Escherichia coli MS 175-1 E_coli175-1-1.0_Cont542.3: | 1.23709746311649e−80 |
| | | NZ_ADUB01000261 | |
| 6 | NC_011092 | Salmonella enterica subsp. enterica serovar Schwarzengrund | 2.41688550175243e−75 |
| | | str. CVM19633 plasmid pCVM19633_110: NC_011092 | |
| 7 | NZ_ADWV01000056 | Escherichia coli MS 107-1 E_coliMS107-1-1.0.1_Cont55.1: | 7.68091736117399e−72 |
| | | NZ_ADWV01000056 | |
| 8 | NZ_AAJX01000089 | Escherichia coli B171, unfinished sequence: NZ_AAJX01000089 | 1.57772112100981e−71 |
| 9 | NC_011743 | Escherichia fergusonii ATCC 35469 plasmid pEFER: NC_011743 | 1.0118246517332e−69 |
| 10 | NC_013509 | Edwardsiella tarda EIB202 plasmid pEIB202: NC_013509 | 1.23255842888535e−68 |
| 11 | NZ_GG749218 | Escherichia coli FVEC1412 genomic scaffold supercont1.13: | 6.77313303746994e−68 |
| | | NZ_GG749218 | |
| 12 | NC_013509 | Edwardsiella tarda EIB202 plasmid pEIB202: NC_013509 | 1.94619564613577e−64 |
| 13 | NZ_GG749218 | Escherichia coli FVEC1412 genomic scaffold supercont1.13: | 1.86737834552034e−63 |
| | | NZ_GG749218 | |
| 14 | NC_013717 | Citrobacter rodentium ICC168 plasmid pCROD1: NC_013717 | 7.42780365363135e−62 |
| 15 | NC_013717 | Citrobacter rodentium ICC168 plasmid pCROD1: NC_013717 | 3.07751376659308e−61 |
| 16 | NZ_ADWS01000089 | Escherichia coli MS 145-7 E_coliMS145-7-1.0.1_Cont88.1: | 1.7351795845908e−60 |
| | | NZ_ADWS01000089 | |
| 17 | NC_011751 | Escherichia coli UMN026: NC_011751 | 2.44317906034667e−60 |
| 18 | NC_011751 | Escherichia coli UMN026: NC_011751 | 6.73588199342071e−60 |
| 19 | NZ_ADWV01000056 | Escherichia coli MS 107-1 E_coliMS107-1-1.0.1_Cont55.1: | 2.62943019143703e−59 |
| | | NZ_ADWV01000056 | |
| 20 | NC_010488 | Escherichia coli SECEC SMS-3-5 plasmid pSMS35_130: NC_010488 | 3.46702381924878e−47 |
| 21 | NZ_ADTM01000311 | Escherichia coli MS 182-1 E_coli182-1-1.0_Cont460.3: | 4.65308035729244e−46 |
| | | NZ_ADTM01000311 | |
| 22 | NZ_ADWS01000095 | Escherichia coli MS 145-7 E_coliMS145-7-1.0.1_Cont94.1: | 7.71451120848483e−46 |
| | | NZ_ADWS01000095 | |
| 23 | NZ_ADTM01000311 | Escherichia coli MS 182-1 E_coli182-1-1.0_Cont460.3: | 1.08551755499227e−44 |
| | | NZ_ADTM01000311 | |
| 24 | NC_009650 | Klebsiella pneumoniae subsp. pneumoniae MGH 78578 plasmid | 4.89761264283562e−44 |
| | | pKPN4: NC_009650 | |
| 25 | NZ_ADWV01000017 | Escherichia coli MS 107-1 E_coliMS107-1-1.0.1_Cont16.1: | 6.97693050178087e−44 |
| | | NZ_ADWV01000017 | |
| 26 | NC_009650 | Klebsiella pneumoniae subsp. pneumoniae MGH 78578 plasmid | 9.68294892967391e−44 |
| | | pKPN4: NC_009650 | |
| 27 | NZ_GG665811 | Escherichia sp. 1_1_43 genomic scaffold supercont1.1: | 3.5843867496487e−43 |
| | | NZ_GG665811 | |
| 28 | NZ_ADTL01000051 | Escherichia coli MS 115-1 E_coli115-1-1.0_Cont158.2: | 3.5843867496487e−43 |
| | | NZ_ADTL01000051 | |
| 29 | AP011957 | Salmonella enterica subsp. enterica serovar Typhimurium str. | 5.53805522527039e−43 |
| | | T000240 DNA: AP011957 | |
| 30 | NC_011282 | Klebsiella pneumoniae 342 plasmid pKP187: NC_011282 | 2.71226651272988e−42 |
| 31 | NZ_ABHR01000011 | Escherichia coli O157:H7 str. EC4401, unfinished sequence: | 8.45082785112866e−42 |
| | | NZ_ABHR01000011 | |
| 32 | NC_010488 | Escherichia coli SECEC SMS-3-5 plasmid pSMS35_130: NC_010488 | 1.02749291231853e−41 |
| 33 | NZ_AFBO01000013 | Klebsiella sp. MS 92-3 K_spMS92-3-l.0_Cont24.1: | 1.46909169086738e−41 |
| | | NZ_AFBO01000013 | |
| 34 | CP002797 | Escherichia coli NA114: CP002797 | 2.43588122712712e−41 |
| 35 | NZ_ABHK01000002 | Escherichia coli O157:H7 str. EC4206, unfinished sequence: | 2.60702932643171e−41 |
| | | NZ_ABHK01000002 | |
| 36 | NZ_GG657366 | Citrobacter sp. 30_2 genomic scaffold supercont1.1: | 2.60702932643171e−41 |
| | | NZ_GG657366 | |
| 37 | NC_011353 | Escherichia coli O157:H7 str. EC4115: NC_011353 | 2.60702932643171e−41 |
| 38 | NZ_ABWL01000012 | Citrobacter youngae ATCC 29220 C_sp-1.0_Cont2.3: | 3.21133372679738e−41 |
| | | NZ_ABWL01000012 | |
| 39 | AP009378 | Escherichia coli SE15 DNA: AP009378 | 3.68640118720819e−41 |
| 40 | NZ_ACXN01000074 | Escherichia coli O157:H7 str. FRIK966: NZ_ACXN01000074 | 5.75695041652081e−41 |
| 41 | NC_007384 | Shigella sonnei Ss046: NC_007384 | 6.75951367822551e−41 |
| 42 | NZ_ABWL01000012 | Citrobacter youngae ATCC 29220 C_sp-1.0_Cont2.3: | 8.12681193093067e−41 |
| | | NZ_ABWL01000012 | |
| 43 | NZ_ADTL01000083 | Escherichia coli MS 115-1 E_coli115-1-1.0_Cont264.1: | 8.12681193093067e−41 |
| | | NZ_ADTL01000083 | |
| 44 | AC_000091 | Escherichia coli W3110 DNA: AC_000091 | 8.12681193093067e−41 |
| 45 | NZ_ADUD01000537 | Escherichia coli MS 196-1 E_colil96-1-1.0_Cont1482.1: | 1.06521634399457e−40 |
| | | NZ_ADUD01000537 | |
| 46 | NC_011083 | Salmonella enterica subsp. enterica serovar Heidelberg str. | 1.84998224240006e−40 |
| | | SL476: NC_011083 | |
| 47 | CP001383 | Shigella flexneri 2002017: CP001383 | 1.89942261631873e−40 |
| 48 | NZ_ADTR01000134 | Escherichia coli MS 21-1 E_coli21-1-1.0_Cont296.1: | 3.35939290103889e−40 |
| | | NZ_ADTR01000134 | |
| 49 | NC_009650 | Klebsiella pneumoniae subsp. pneumoniae MGH 78578 plasmid | 3.76989142366575e−40 |
| | | pKPN4: NC_009650 | |
| 50 | NC_004851 | Shigella flexneri 2a str. 301 plasmid pCP301: NC_004851 | 8.68449218790606e−39 |

TABLE 7b
Data for Escherichia, particularly E. coli (continued)

| No. | sign_phenos | sign_phenos_class | best_pheno | best_pheno_class |
|---|---|---|---|---|
| 1 | AM; A/S; AUG; CAX; CP; CRM; GM; | aminoglycoside; fluoroquinolone; lactam; other | AM | lactam |
| | LVX; TO; T/S | | | |
| 2 | AM; A/S; AUG; AZT; CAX; CFT; CP; | aminoglycoside; fluoroquinolone; lactam; other | T/S | other |
| | CRM; GM; LVX; TO; T/S | | | |
| 3 | AM; A/S; AUG; AZT; CAX; CFT; CP; | aminoglycoside; fluoroquinolone; lactam; other | T/S | other |
| | CRM; GM; LVX; TO; T/S | | | |
| 4 | AM; A/S; AUG; AZT; CAX; CFT; CP; | aminoglycoside; fluoroquinolone; lactam; other | T/S | other |
| | CRM; GM; LVX; TO; T/S | | | |
| 5 | AM; A/S; AUG; CRM | lactam | AM | lactam |
| 6 | AM; A/S; AUG | lactam | AM | lactam |
| 7 | AM; A/S; AUG; AZT; CAX; CFT; CP; | aminoglycoside; fluoroquinolone; lactam; other | T/S | other |
| | CRM; GM; LVX; TO; T/S | | | |
| 8 | AM; A/S; AUG; AZT; CAX; CFT; CP; | aminoglycoside; fluoroquinolone; lactam; other | T/S | other |
| | CRM; GM; LVX; TO; T/S | | | |
| 9 | AM; A/S; AUG; AZT; CAX; CFT; CP; | aminoglycoside; fluoroquinolone; lactam; other | T/S | other |
| | CRM; GM; LVX; TO; T/S | | | |
| 10 | AM; A/S; AUG; AZT; CAX; CFT; CP; | aminoglycoside; fluoroquinolone; lactam; other | T/S | other |
| | CRM; GM; LVX; TO; T/S | | | |
| 11 | AM; A/S; AUG; AZT; CAX; CFT; CP; | aminoglycoside; fluoroquinolone; lactam; other | T/S | other |
| | CRM; GM; LVX; TO; T/S | | | |
| 12 | AM; A/S; AUG; AZT; CAX; CFT; CP; | aminoglycoside; fluoroquinolone; lactam; other | T/S | other |
| | CRM; GM; LVX; TO; T/S | | | |
| 13 | AM; A/S; AUG; AZT; CAX; CFT; CP; | aminoglycoside; fluoroquinolone; lactam; other | T/S | other |
| | CRM; GM; LVX; TO; T/S | | | |
| 14 | AM; A/S; AUG; AZT; CAX; CFT; CP; | aminoglycoside; fluoroquinolone; lactam; other | LVX | fluoroquinolone |
| | CRM; GM; LVX; TO; T/S | | | |
| 15 | AM; A/S; AUG; AZT; CAX; CFT; CP; | aminoglycoside; fluoroquinolone; lactam; other | LVX | fluoroquinolone |
| | CRM; GM; LVX; TO; T/S | | | |
| 16 | AM; A/S; AUG; AZT; CAX; CFT; CP; | aminoglycoside; fluoroquinolone; lactam; other | T/S | other |
| | CRM; GM; LVX; TO; T/S | | | |
| 17 | AM; A/S; AUG; AZT; CAX; CFT; CP; | aminoglycoside; fluoroquinolone; lactam; other | T/S | other |
| | CRM; GM; LVX; TO; T/S | | | |
| 18 | AM; A/S; AUG; AZT; CAX; CFT; CP; | aminoglycoside; fluoroquinolone; lactam; other | T/S | other |
| | CRM; GM; LVX; TO; T/S | | | |
| 19 | AM; A/S; AUG; AZT; CAX; CFT; CP; | aminoglycoside; fluoroquinolone; lactam; other | T/S | other |
| | CRM; GM; LVX; TO; T/S | | | |
| 20 | AM; A/S; AUG; AZT; CAX; CFT; CP; | aminoglycoside; fluoroquinolone; lactam; other | T/S | other |
| | CRM; GM; LVX; TO; T/S | | | |
| 21 | AM; A/S; AUG; AZT; CAX; CFT; CP; | aminoglycoside; fluoroquinolone; lactam; other | CAX | lactam |
| | CRM; GM; LVX; TO; T/S | | | |
| 22 | AM; A/S; AUG; AZT; CAX; CFT; CP; | aminoglycoside; fluoroquinolone; lactam; other | T/S | other |
| | CRM; GM; LVX; TO; T/S | | | |
| 23 | AM; A/S; AUG; AZT; CAX; CFT; CP; | aminoglycoside; fluoroquinolone; lactam; other | AM | lactam |
| | CRM; GM; LVX; TO; T/S | | | |
| 24 | AM; A/S; AUG; CAX; CFT; CP; CRM; | aminoglycoside; fluoroquinolone; lactam; other | T/S | other |
| | GM; LVX; TO; T/S | | | |
| 25 | AM; A/S; AUG; AZT; CAX; CFT; CP; | aminoglycoside; fluoroquinolone; lactam; other | T/S | other |
| | CRM; GM; LVX; T/S | | | |
| 26 | AM; A/S; AUG; AZT; CAX; CFT; CP; | aminoglycoside; fluoroquinolone; lactam; other | T/S | other |
| | CRM; GM; TO; T/S | | | |
| 27 | AM; AUG; AZT; CAX; CFT; CP; CRM; | aminoglycoside; fluoroquinolone; lactam; other | LVX | fluoroquinolone |
| | GM; LVX; TO; T/S | | | |
| 28 | AM; AUG; AZT; CAX; CFT; CP; CRM; | aminoglycoside; fluoroquinolone; lactam; other | LVX | fluoroquinolone |
| | GM; LVX; TO; T/S | | | |
| 29 | AM; A/S; AUG; CAX; CFT; CP; CRM; | aminoglycoside; fluoroquinolone; lactam; other | T/S | other |
| | GM; LVX; T/S | | | |
| 30 | AM; A/S; AUG; AZT; CAX; CFT; CP; | aminoglycoside; fluoroquinolone; lactam; other | LVX | fluoroquinolone |
| | CRM; GM; LVX; TO; T/S | | | |
| 31 | AM; A/S; AUG; AZT; CAX; CFT; CP; | aminoglycoside; fluoroquinolone; lactam; other | CP | fluoroquinolone |
| | CRM; GM; LVX; TO; T/S | | | |
| 32 | AM; A/S; AUG; AZT; CAX; CFT; CP; | aminoglycoside; fluoroquinolone; lactam; other | LVX | fluoroquinolone |
| | CRM; GM; LVX; TO; T/S | | | |
| 33 | AM; A/S; AUG; AZT; CAX; CFT; CP; | aminoglycoside; fluoroquinolone; lactam; other | LVX | fluoroquinolone |
| | CRM; GM; LVX; TO; T/S | | | |
| 34 | AM; A/S; AUG; AZT; CAX; CFT; CP; | aminoglycoside; fluoroquinolone; lactam; other | LVX | fluoroquinolone |
| | CRM; GM; LVX; TO; T/S | | | |
| 35 | AM; A/S; AUG; AZT; CAX; CFT; CP; | aminoglycoside; fluoroquinolone; lactam; other | LVX | fluoroquinolone |
| | CRM; GM; LVX; TO; T/S | | | |
| 36 | AM; A/S; AUG; AZT; CAX; CFT; CP; | aminoglycoside; fluoroquinolone; lactam; other | LVX | fluoroquinolone |
| | CRM; GM; LVX; TO; T/S | | | |
| 37 | AM; A/S; AUG; AZT; CAX; CFT; CP; | aminoglycoside; fluoroquinolone; lactam; other | LVX | fluoroquinolone |
| | CRM; GM; LVX; TO; T/S | | | |
| 38 | AM; A/S; AUG; AZT; CAX; CFT; CP; | aminoglycoside; fluoroquinolone; lactam; other | LVX | fluoroquinolone |
| | CRM; GM; LVX; TO; T/S | | | |
| 39 | AM; A/S; AUG; AZT; CAX; CFT; CP; | aminoglycoside; fluoroquinolone; lactam; other | LVX | fluoroquinolone |
| | CRM; GM; LVX; TO; T/S | | | |
| 40 | AM; A/S; AUG; AZT; CAX; CFT; CP; | aminoglycoside; fluoroquinolone; lactam; other | CP | fluoroquinolone |
| | CRM; GM; LVX; TO; T/S | | | |
| 41 | AM; A/S; AUG; AZT; CAX; CFT; CP; | aminoglycoside; fluoroquinolone; lactam; other | LVX | fluoroquinolone |
| | CRM; GM; LVX; TO; T/S | | | |
| 42 | AM; A/S; AUG; AZT; CAX; CFT; CP; | aminoglycoside; fluoroquinolone; lactam; other | LVX | fluoroquinolone |
| | CRM; GM; LVX; TO; T/S | | | |
| 43 | AM; A/S; AUG; AZT; CAX; CFT; CP; | aminoglycoside; fluoroquinolone; lactam; other | LVX | fluoroquinolone |
| | CRM; GM; LVX; TO; T/S | | | |
| 44 | AM; A/S; AUG; AZT; CAX; CFT; CP; | aminoglycoside; fluoroquinolone; lactam; other | LVX | fluoroquinolone |
| | CRM; GM; LVX; TO; T/S | | | |
| 45 | AM; A/S; AUG; AZT; CAX; CFT; CP; | aminoglycoside; fluoroquinolone; lactam; other | T/S | other |
| | CRM; GM; T/S | | | |
| 46 | AM; A/S; AUG; AZT; CAX; CFT; CP; | aminoglycoside; fluoroquinolone; lactam; other | LVX | fluoroquinolone |
| | CRM; GM; LVX; TO; T/S | | | |
| 47 | AM; A/S; AUG; AZT; CAX; CFT; CP; | aminoglycoside; fluoroquinolone; lactam; other | LVX | fluoroquinolone |
| | CRM; GM; LVX; TO; T/S | | | |
| 48 | AM; A/S; AUG; AZT; CAX; CFT; CP; | aminoglycoside; fluoroquinolone; lactam; other | LVX | fluoroquinolone |
| | CRM; GM; LVX; TO; T/S | | | |
| 49 | AM; A/S; AUG; T/S | lactam; other | T/S | other |
| 50 | AM; A/S; AUG; AZT; CAX; CFT; CP; | aminoglycoside; fluoroquinolone; lactam; other | LVX | fluoroquinolone |
| | CRM; GM; LVX; TO; T/S | | | |

TABLE 7c
Data for Escherichia, particularly E. coli (continued)

| No. | num_aminoglycoside | num_fluoroquinolone | num_lactam | num_other |
|---|---|---|---|---|
| 1 | 2 | 2 | 5 | 1 |
| 2 | 2 | 2 | 7 | 1 |
| 3 | 2 | 2 | 7 | 1 |
| 4 | 2 | 2 | 7 | 1 |
| 5 | 0 | 0 | 4 | 0 |
| 6 | 0 | 0 | 3 | 0 |
| 7 | 2 | 2 | 7 | 1 |
| 8 | 2 | 2 | 7 | 1 |
| 9 | 2 | 2 | 7 | 1 |
| 10 | 2 | 2 | 7 | 1 |
| 11 | 2 | 2 | 7 | 1 |
| 12 | 2 | 2 | 7 | 1 |
| 13 | 2 | 2 | 7 | 1 |
| 14 | 2 | 2 | 7 | 1 |
| 15 | 2 | 2 | 7 | 1 |
| 16 | 2 | 2 | 7 | 1 |
| 17 | 2 | 2 | 7 | 1 |
| 18 | 2 | 2 | 7 | 1 |
| 19 | 2 | 2 | 7 | 1 |
| 20 | 2 | 2 | 7 | 1 |
| 21 | 2 | 2 | 7 | 1 |
| 22 | 2 | 2 | 7 | 1 |
| 23 | 2 | 2 | 7 | 1 |
| 24 | 2 | 2 | 6 | 1 |
| 25 | 1 | 2 | 7 | 1 |
| 26 | 2 | 1 | 7 | 1 |
| 27 | 2 | 2 | 6 | 1 |
| 28 | 2 | 2 | 6 | 1 |
| 29 | 1 | 2 | 6 | 1 |
| 30 | 2 | 2 | 7 | 1 |
| 31 | 2 | 2 | 7 | 1 |
| 32 | 2 | 2 | 7 | 1 |
| 33 | 2 | 2 | 7 | 1 |
| 34 | 2 | 2 | 7 | 1 |
| 35 | 2 | 2 | 7 | 1 |
| 36 | 2 | 2 | 7 | 1 |
| 37 | 2 | 2 | 7 | 1 |
| 38 | 2 | 2 | 7 | 1 |
| 39 | 2 | 2 | 7 | 1 |
| 40 | 2 | 2 | 7 | 1 |
| 41 | 2 | 2 | 7 | 1 |
| 42 | 2 | 2 | 7 | 1 |
| 43 | 2 | 2 | 7 | 1 |
| 44 | 2 | 2 | 7 | 1 |
| 45 | 1 | 1 | 7 | 1 |
| 46 | 2 | 2 | 7 | 1 |
| 47 | 2 | 2 | 7 | 1 |
| 48 | 2 | 2 | 7 | 1 |
| 49 | 0 | 0 | 3 | 1 |
| 50 | 2 | 2 | 7 | 1 |

TABLE 7d
Data for Escherichia, particularly E. coli (continued)

| No. | AM_pv_adj | A/S_pv_adj | AUG_pv_adj | AZT_pv_adj |
|---|---|---|---|---|
| 1 | 3.50E−207 | 1.39E−175 | 2.23E−54 | 1.94E−02 |
| 2 | 3.12E−58 | 4.85E−48 | 1.56E−20 | 2.24E−14 |
| 3 | 2.85E−46 | 1.23E−39 | 2.49E−17 | 7.44E−15 |
| 4 | 2.62E−45 | 3.93E−39 | 1.12E−17 | 7.82E−14 |
| 5 | 1.24E−80 | 9.93E−72 | 2.04E−21 | 1.77E−02 |
| 6 | 2.42E−75 | 1.11E−66 | 8.58E−21 | 6.08E−02 |
| 7 | 1.01E−26 | 2.48E−22 | 5.21E−09 | 2.11E−04 |
| 8 | 4.88E−38 | 1.20E−35 | 3.67E−16 | 6.67E−10 |
| 9 | 2.35E−59 | 7.04E−49 | 2.73E−24 | 1.89E−06 |
| 10 | 2.35E−59 | 7.04E−49 | 1.31E−23 | 5.63E−06 |
| 11 | 1.84E−24 | 1.82E−23 | 1.33E−10 | 1.05E−06 |
| 12 | 2.51E−64 | 6.77E−56 | 3.88E−22 | 9.19E−04 |
| 13 | 2.79E−25 | 9.09E−23 | 1.32E−08 | 1.48E−03 |
| 14 | 2.94E−45 | 2.43E−34 | 1.15E−22 | 2.63E−14 |
| 15 | 1.58E−45 | 1.72E−34 | 1.75E−22 | 1.91E−14 |
| 16 | 3.26E−28 | 1.85E−21 | 2.00E−08 | 1.16E−05 |
| 17 | 1.44E−20 | 2.94E−18 | 5.11E−07 | 1.25E−04 |
| 18 | 6.63E−29 | 5.38E−22 | 1.16E−08 | 1.11E−05 |
| 19 | 6.41E−30 | 1.52E−22 | 9.58E−09 | 6.45E−06 |
| 20 | 4.62E−35 | 3.20E−30 | 5.19E−17 | 2.18E−07 |
| 21 | 1.82E−09 | 8.62E−11 | 2.50E−17 | 1.74E−39 |
| 22 | 3.88E−27 | 4.06E−27 | 4.62E−12 | 9.38E−06 |
| 23 | 1.09E−44 | 2.09E−39 | 1.05E−16 | 2.10E−06 |
| 24 | 2.75E−28 | 8.80E−22 | 3.79E−08 | 1.79E−02 |
| 25 | 6.10E−28 | 3.56E−20 | 2.25E−09 | 8.28E−04 |
| 26 | 5.97E−23 | 1.19E−15 | 1.39E−06 | 1.28E−03 |
| 27 | 4.17E−03 | 3.66E−02 | 4.90E−07 | 1.65E−14 |
| 28 | 4.17E−03 | 3.66E−02 | 4.90E−07 | 1.65E−14 |
| 29 | 1.37E−28 | 1.45E−21 | 8.41E−09 | 2.36E−02 |
| 30 | 5.88E−10 | 1.33E−07 | 1.85E−09 | 7.58E−11 |
| 31 | 1.14E−08 | 2.28E−05 | 5.66E−08 | 3.43E−16 |
| 32 | 1.96E−09 | 3.67E−07 | 4.28E−09 | 1.44E−10 |
| 33 | 2.88E−09 | 5.08E−07 | 4.50E−09 | 1.51E−10 |
| 34 | 1.07E−10 | 2.85E−08 | 1.31E−06 | 4.19E−06 |
| 35 | 4.32E−08 | 6.04E−05 | 1.49E−07 | 4.44E−16 |
| 36 | 8.33E−08 | 9.79E−05 | 2.97E−07 | 4.44E−16 |
| 37 | 8.33E−08 | 9.79E−05 | 2.97E−07 | 4.44E−16 |
| 38 | 3.07E−08 | 4.70E−05 | 1.02E−07 | 7.64E−16 |
| 39 | 4.14E−12 | 7.23E−10 | 1.20E−05 | 1.17E−03 |
| 40 | 1.57E−07 | 1.55E−04 | 4.17E−07 | 7.80E−16 |
| 41 | 2.15E−07 | 1.95E−04 | 5.61E−07 | 8.13E−16 |
| 42 | 1.55E−07 | 1.54E−04 | 3.95E−07 | 8.67E−16 |
| 43 | 1.55E−07 | 1.54E−04 | 3.95E−07 | 8.67E−16 |
| 44 | 1.55E−07 | 1.54E−04 | 3.95E−07 | 8.67E−16 |
| 45 | 3.13E−28 | 1.97E−20 | 2.60E−09 | 3.55E−04 |
| 46 | 1.16E−10 | 3.41E−08 | 3.47E−07 | 2.45E−06 |
| 47 | 2.72E−09 | 3.18E−07 | 2.44E−07 | 1.12E−10 |
| 48 | 2.66E−09 | 8.84E−08 | 1.21E−05 | 1.64E−08 |
| 49 | 4.47E−24 | 6.61E−18 | 2.77E−06 | 2.45E−01 |
| 50 | 2.16E−06 | 8.47E−04 | 1.36E−06 | 7.02E−16 |

TABLE 7e
Data for Escherichia, particularly E. coli (continued)

| No. | CAX_pv_adj | CFT_pv_adj | CP_pv_adj | CRM_pv_adj |
|---|---|---|---|---|
| 1 | 9.08E−03 | 5.54E−02 | 2.29E−17 | 2.63E−05 |
| 2 | 4.55E−21 | 9.31E−20 | 3.14E−43 | 1.15E−19 |
| 3 | 4.33E−19 | 1.87E−17 | 1.53E−32 | 5.07E−17 |
| 4 | 6.85E−18 | 2.28E−16 | 6.99E−31 | 7.62E−16 |
| 5 | 1.28E−02 | 7.14E−02 | 5.78E−01 | 3.21E−04 |
| 6 | 1.41E−01 | 3.53E−01 | 2.23E−01 | 3.75E−02 |
| 7 | 2.25E−06 | 3.51E−06 | 1.44E−38 | 1.55E−08 |
| 8 | 3.18E−15 | 1.35E−14 | 4.48E−11 | 1.70E−12 |
| 9 | 2.34E−05 | 5.15E−06 | 1.74E−15 | 7.72E−10 |
| 10 | 5.80E−05 | 9.14E−06 | 6.46E−15 | 2.18E−09 |
| 11 | 6.82E−10 | 3.64E−09 | 1.69E−49 | 1.37E−10 |
| 12 | 5.59E−03 | 1.88E−03 | 1.12E−09 | 2.39E−05 |
| 13 | 9.17E−05 | 2.37E−04 | 1.28E−36 | 6.73E−06 |
| 14 | 8.04E−16 | 5.19E−14 | 7.03E−61 | 9.05E−21 |
| 15 | 5.55E−16 | 2.31E−14 | 2.47E−60 | 6.03E−21 |
| 16 | 5.30E−07 | 2.10E−06 | 1.38E−39 | 8.69E−08 |
| 17 | 1.67E−06 | 3.95E−06 | 1.23E−38 | 5.25E−08 |
| 18 | 4.67E−07 | 1.87E−06 | 6.39E−39 | 5.20E−08 |
| 19 | 4.17E−07 | 1.68E−06 | 2.84E−39 | 4.28E−08 |
| 20 | 5.95E−11 | 4.86E−10 | 4.79E−07 | 1.46E−09 |
| 21 | 4.65E−46 | 9.26E−45 | 3.20E−19 | 1.06E−36 |
| 22 | 5.55E−08 | 2.77E−08 | 8.59E−09 | 1.64E−09 |
| 23 | 4.89E−09 | 9.33E−07 | 3.24E−25 | 8.32E−08 |
| 24 | 8.50E−03 | 9.80E−03 | 5.28E−05 | 4.13E−03 |
| 25 | 4.82E−05 | 7.11E−05 | 5.83E−03 | 5.89E−04 |
| 26 | 1.31E−04 | 1.77E−04 | 7.59E−03 | 2.84E−03 |
| 27 | 2.32E−15 | 2.75E−17 | 6.79E−43 | 2.56E−16 |
| 28 | 2.32E−15 | 2.75E−17 | 6.79E−43 | 2.56E−16 |
| 29 | 3.66E−03 | 4.47E−03 | 4.75E−03 | 2.48E−03 |
| 30 | 6.25E−11 | 6.54E−10 | 4.02E−42 | 2.80E−12 |
| 31 | 6.60E−17 | 2.67E−17 | 8.45E−42 | 2.23E−17 |
| 32 | 7.29E−11 | 7.76E−10 | 1.57E−41 | 5.31E−12 |
| 33 | 7.91E−11 | 8.46E−10 | 2.18E−41 | 1.70E−11 |
| 34 | 4.29E−06 | 1.52E−06 | 1.28E−40 | 1.80E−07 |
| 35 | 1.31E−16 | 5.36E−17 | 3.96E−41 | 4.26E−17 |
| 36 | 1.31E−16 | 5.36E−17 | 3.96E−41 | 4.26E−17 |
| 37 | 1.31E−16 | 5.36E−17 | 3.96E−41 | 4.26E−17 |
| 38 | 1.43E−16 | 5.77E−17 | 4.56E−41 | 1.17E−17 |
| 39 | 6.46E−05 | 1.74E−04 | 2.25E−40 | 1.80E−06 |
| 40 | 2.55E−16 | 1.06E−16 | 5.76E−41 | 7.39E−17 |
| 41 | 2.58E−16 | 1.06E−16 | 1.05E−40 | 7.84E−17 |
| 42 | 2.68E−16 | 1.10E−16 | 1.19E−40 | 2.23E−17 |
| 43 | 2.68E−16 | 1.10E−16 | 1.19E−40 | 2.23E−17 |
| 44 | 2.68E−16 | 1.10E−16 | 1.19E−40 | 2.23E−17 |
| 45 | 1.90E−05 | 2.89E−05 | 6.00E−03 | 1.99E−04 |
| 46 | 1.84E−06 | 5.25E−07 | 1.05E−39 | 6.76E−08 |
| 47 | 8.60E−10 | 4.43E−09 | 9.49E−40 | 8.85E−14 |
| 48 | 2.36E−11 | 1.27E−10 | 4.92E−38 | 2.22E−11 |
| 49 | 1.07E−01 | 1.14E−01 | 1.50E−02 | 6.49E−02 |
| 50 | 4.02E−16 | 1.67E−16 | 1.34E−38 | 7.42E−18 |

TABLE 7f
Data for Escherichia, particularly E. coli (continued)

| No. | GM_pv_adj | LVX_pv_adj | TO_pv_adj | T/S_pv_adj |
|---|---|---|---|---|
| 1 | 2.40E−14 | 2.96E−16 | 6.56E−10 | 5.59E−55 |
| 2 | 9.02E−31 | 5.84E−43 | 3.02E−26 | 1.62E−119 |
| 3 | 3.09E−28 | 1.25E−33 | 1.52E−27 | 6.25E−97 |
| 4 | 1.19E−27 | 5.56E−32 | 5.30E−27 | 8.78E−96 |
| 5 | 5.50E−01 | 4.74E−01 | 9.96E−02 | 3.77E−02 |
| 6 | 8.08E−01 | 2.88E−01 | 8.73E−01 | 1.21E−01 |
| 7 | 2.33E−13 | 1.57E−38 | 6.37E−15 | 7.68E−72 |
| 8 | 4.17E−11 | 5.22E−11 | 1.79E−08 | 1.58E−71 |
| 9 | 7.23E−11 | 6.17E−14 | 8.00E−05 | 1.01E−69 |
| 10 | 2.80E−10 | 1.39E−13 | 8.00E−05 | 1.23E−68 |
| 11 | 1.18E−18 | 2.49E−49 | 2.67E−22 | 6.77E−68 |
| 12 | 7.65E−07 | 1.10E−08 | 7.07E−03 | 1.95E−64 |
| 13 | 1.21E−16 | 1.92E−37 | 4.13E−18 | 1.87E−63 |
| 14 | 4.86E−26 | 7.43E−62 | 5.25E−32 | 2.58E−39 |
| 15 | 2.72E−26 | 3.08E−61 | 2.92E−32 | 4.30E−39 |
| 16 | 1.39E−16 | 1.68E−39 | 1.59E−17 | 1.74E−60 |
| 17 | 5.78E−18 | 2.01E−39 | 1.91E−19 | 2.44E−60 |
| 18 | 1.02E−16 | 7.87E−39 | 1.17E−17 | 6.74E−60 |
| 19 | 7.38E−17 | 3.56E−39 | 8.56E−18 | 2.63E−59 |
| 20 | 6.73E−07 | 9.82E−07 | 5.94E−07 | 3.47E−47 |
| 21 | 5.34E−12 | 1.45E−19 | 7.00E−09 | 2.74E−06 |
| 22 | 3.89E−07 | 1.14E−08 | 2.09E−05 | 7.71E−46 |
| 23 | 6.04E−13 | 2.10E−24 | 3.47E−12 | 1.02E−37 |
| 24 | 8.52E−06 | 1.56E−04 | 7.54E−03 | 4.90E−44 |
| 25 | 9.39E−05 | 9.80E−03 | 1.28E−02 | 6.98E−44 |
| 26 | 2.16E−04 | 1.65E−02 | 9.49E−03 | 9.68E−44 |
| 27 | 1.81E−12 | 3.58E−43 | 2.05E−13 | 2.13E−06 |
| 28 | 1.81E−12 | 3.58E−43 | 2.05E−13 | 2.13E−06 |
| 29 | 1.08E−04 | 8.15E−03 | 5.44E−02 | 5.54E−43 |
| 30 | 1.81E−12 | 2.71E−42 | 4.67E−11 | 6.64E−17 |
| 31 | 3.65E−19 | 9.37E−42 | 2.80E−17 | 3.20E−18 |
| 32 | 3.61E−12 | 1.03E−41 | 9.37E−11 | 2.18E−16 |
| 33 | 3.86E−12 | 1.47E−41 | 9.73E−11 | 2.45E−16 |
| 34 | 1.03E−13 | 2.44E−41 | 2.22E−16 | 4.82E−04 |
| 35 | 4.79E−19 | 2.61E−41 | 5.83E−17 | 9.95E−18 |
| 36 | 4.79E−19 | 2.61E−41 | 5.83E−17 | 3.03E−17 |
| 37 | 4.79E−19 | 2.61E−41 | 5.83E−17 | 3.03E−17 |
| 38 | 8.47E−19 | 3.21E−41 | 6.04E−17 | 3.36E−18 |
| 39 | 3.56E−12 | 3.69E−41 | 8.59E−15 | 1.04E−04 |
| 40 | 8.74E−19 | 6.20E−41 | 6.42E−17 | 5.21E−17 |
| 41 | 9.35E−19 | 6.76E−41 | 6.96E−17 | 8.31E−17 |
| 42 | 1.03E−18 | 8.13E−41 | 1.27E−16 | 2.95E−17 |
| 43 | 1.03E−18 | 8.13E−41 | 1.27E−16 | 2.95E−17 |
| 44 | 1.03E−18 | 8.13E−41 | 1.27E−16 | 2.95E−17 |
| 45 | 9.79E−05 | 1.29E−02 | 1.33E−02 | 1.07E−40 |
| 46 | 1.98E−13 | 1.85E−40 | 4.73E−16 | 4.17E−04 |
| 47 | 2.68E−16 | 1.90E−40 | 1.10E−17 | 2.80E−08 |
| 48 | 1.27E−13 | 3.36E−40 | 7.14E−14 | 3.41E−07 |
| 49 | 1.15E−02 | 2.48E−02 | 4.44E−01 | 3.77E−40 |
| 50 | 1.50E−18 | 8.68E−39 | 9.76E−17 | 2.56E−15 |

TABLE 7g
Data for Escherichia, particularly E. coli (continued)

| No. | Locus.Tag | Gene.Symbol | GenBank.Accession | Chromosome |
|---|---|---|---|---|
| 1 | SeHA_C1580 | blaT | YP_002045448 | |
| 2 | EcolB7_01001258 | | ZP_00717086 | |
| 3 | HMPREF9345_05066 | | ZP_07100147 | |
| 4 | KPN_pKPN5p08201 | | YP_001338811 | plasmid pKPN5 |
| 5 | HMPREF9547_03104 | | ZP_07169558 | |
| 6 | SeSA_B0079 | | YP_002112958 | plasmid |
| | | | | pCVM19633_110 |
| 7 | HMPREF9345_05232 | | ZP_07100311 | |
| 8 | EcolB_01004576 | | ZP_00708527 | |
| 9 | pEFER_0049 | | YP_002394596 | plasmid pEFER |
| 10 | ETAE_p040 | | YP_003297634 | plasmid pEIB202 |
| 11 | ECGG_04429 | | ZP_06648541 | |
| 12 | ETAE_p041 | folP | YP_003297635 | plasmid pEIB202 |
| 13 | ECGG_04434 | | ZP_06648545 | |
| 14 | ROD_p1051 | pemI | YP_003368450 | plasmid pCROD1 |
| 15 | ROD_p1061 | pemK | YP_003368451 | plasmid pCROD1 |
| 16 | HMPREF9348_05540 | | ZP_07692671 | |
| 17 | ECUMN_4816 | aadA | YP_002415408 | |
| 18 | ECUMN_4827 | mphA | YP_002415417 | |
| 19 | HMPREF9345_05223 | | ZP_07100302 | |
| 20 | EcSMS35_A0150 | | YP_001740030 | plasmid pSMS35_130 |
| 21 | HMPREF9548_03778 | | ZP_07141582 | |
| 22 | HMPREF9348_05561 | | ZP_07692692 | |
| 23 | HMPREF9548_03784 | | ZP_07141588 | |
| 24 | KPN_pKPN4p07064 | | YP_001338673 | plasmid pKPN4 |
| 25 | HMPREF9345_03525 | | ZP_07098656 | |
| 26 | KPN_pKPN4p07068 | merC | YP_001338677 | plasmid pKPN4 |
| 27 | ESCG_01010 | | ZP_04871321 | |
| 28 | HMPREF9540_00466 | | ZP_07133313 | |
| 29 | STMDT12_C39340 | | BAJ38877 | |
| 30 | KPK_A0022 | sopB | YP_002235674 | plasmid pKP187 |
| 31 | EcoliO157_010100014809 | | ZP_02780941 | |
| 32 | EcSMS35_A0072 | sopB | YP_001739960 | plasmid pSMS35_130 |
| 33 | HMPREF9538_00090 | | ZP_08302456 | |
| 34 | ECNA114_2444 | | AEG37278 | |
| 35 | EschericcoliO157_010100006568 | | ZP_02749755 | |
| 36 | CSAG_00128 | | ZP_04560798 | |
| 37 | ECH74115_0422 | mhpA | YP_002268988 | |
| 38 | CIT292_01335 | | ZP_03835561 | |
| 39 | ECSF_1165 | | BAI54705 | |
| 40 | EscherichiacoliO157EcO_010100009454 | | ZP_05948572 | |
| 41 | SSON_0329 | mhpD | YP_309341 | |
| 42 | CIT292_01336 | | ZP_03835562 | |
| 43 | HMPREF9540_00984 | | ZP_07133822 | |
| 44 | Missing | mhpE | AP_001004 | |
| | locus_tag:AC_000091.cds340.373092..374105 | | | |
| 45 | HMPREF9551_04611 | | ZP_07191964 | |
| 46 | SeHA_C2638 | | YP_002046450 | |
| 47 | SFxv_0758 | | ADA73054 | |
| 48 | HMPREF9530_01431 | | ZP_07151340 | |
| 49 | KPN_pKPN4p07069 | merA | YP_001338678 | plasmid pKPN4 |
| 50 | CP0077 | | NP_858210 | plasmid pCP301 |

TABLE 7h
Data for Escherichia, particularly E. coli (continued)

| No. | Start.Coord | End.Coord | Strand | Scaffold.ID |
|---|---|---|---|---|
| 1 | 1525960 | 1526820 | + | 642555218 |
| 2 | 77515 | 77910 | + | 638358454 |
| 3 | 4715 | 5554 | − | 648294624 |
| 4 | 34908 | 35255 | − | 640753021 |
| 5 | 3248 | 3841 | + | 648291919 |
| 6 | 68933 | 70240 | + | 642555219 |
| 7 | 5252 | 5572 | − | 648294635 |
| 8 | 3555 | 4568 | + | 638359041 |
| 9 | 48658 | 49503 | + | 643692014 |
| 10 | 31237 | 32040 | − | 646311959 |
| 11 | 19278 | 19826 | + | 647536609 |
| 12 | 32101 | 32916 | − | 646311959 |
| 13 | 22618 | 23823 | + | 647536609 |
| 14 | 3339 | 3596 | + | 646311988 |
| 15 | 3529 | 3930 | + | 646311988 |
| 16 | 461 | 1045 | − | 649994953 |
| 17 | 4994882 | 4995670 | + | 644736335 |
| 18 | 5003053 | 5003958 | − | 644736335 |
| 19 | 1167 | 2405 | + | 648294635 |
| 20 | 118542 | 119474 | + | 641522668 |
| 21 | 4493 | 5755 | + | 648288593 |
| 22 | 209 | 661 | + | 649994959 |
| 23 | 8819 | 9535 | + | 648288593 |
| 24 | 23310 | 24614 | − | 640753020 |
| 25 | 1071 | 1307 | − | 648294596 |
| 26 | 25970 | 27664 | − | 640753020 |
| 27 | 241682 | 242032 | + | 646206991 |
| 28 | 192 | 443 | + | 648287910 |
| 29 | 4084530 | 4085237 | − | 651053007 |
| 30 | 12106 | 13071 | − | 643348532 |
| 31 | 123136 | 123969 | − | 641781714 |
| 32 | 53664 | 54635 | − | 641522668 |
| 33 | 5657 | 6832 | + | 651332930 |
| 34 | 2476906 | 2477910 | − | 651053098 |
| 35 | 369676 | 370620 | + | 641780393 |
| 36 | 146099 | 147763 | + | 646206732 |
| 37 | 430810 | 432474 | + | 643348548 |
| 38 | 25505 | 26449 | + | 643891503 |
| 39 | 1248345 | 1249289 | + | 646862305 |
| 40 | 20015 | 20965 | + | 645964942 |
| 41 | 356486 | 357301 | + | 640427102 |
| 42 | 26463 | 27344 | + | 643891503 |
| 43 | 7204 | 8217 | + | 648287942 |
| 44 | 373092 | 374105 | + | 637000000 |
| 45 | 97 | 531 | − | 648293053 |
| 46 | 2550781 | 2552010 | + | 642555218 |
| 47 | 734541 | 734921 | + | 646862363 |
| 48 | 8 | 643 | − | 648290358 |
| 49 | 27716 | 28177 | − | 640753020 |
| 50 | 61397 | 61579 | + | 637000224 |

TABLE 8a
Data for Escherichia, particularly E. coli

| | Scaffold.External. | | |
|---|---|---|---|
| No. | Accession | Scaffold.Name | best_pv |
| 1 | NC_011083 | Salmonella enterica subsp. enterica serovar Heidelberg | 3.5041948925527e−207 |
| | | str. SL476: NC_011083 | |
| 2 | NZ_AAJT01000012 | Escherichia coli B7A, unfinished sequence: NZ_AAJT01000012 | 1.62252621621877e−119 |
| 3 | NZ_ADWV01000045 | Escherichia coli MS 107-1 E_coliMS107-1-1.0.1_Cont44.1: | 6.24750842070913e−97 |
| | | NZ_ADWV01000045 | |
| 4 | NC_009651 | Klebsiella pneumoniae subsp. pneumoniae MGH 78578 plasmid | 8.77735582031733e−96 |
| | | pKPN5: NC_009651 | |
| 5 | NZ_ADWV01000056 | Escherichia coli MS 107-1 E_coliMS107-1-1.0.1_Cont55.1: | 7.68091736117399e−72 |
| | | NZ_ADWV01000056 | |
| 6 | NZ_AAJX01000089 | Escherichia coli B171, unfinished sequence: | 1.57772112100981e−71 |
| | | NZ_AAJX01000089 | |
| 7 | NC_011743 | Escherichia fergusonii ATCC 35469 plasmid pEFER: NC_011743 | 1.0118246517332e−69 |
| 8 | NC_013509 | Edwardsiella tarda EIB202 plasmid pEIB202: NC_013509 | 1.23255842888535e−68 |
| 9 | NZ_GG749218 | Escherichia coli FVEC1412 genomic scaffold supercont1.13: | 6.77313303746994e−68 |
| | | NZ_GG749218 | |
| 10 | NC_013509 | Edwardsiella tarda EIB202 plasmid pEIB202: NC_013509 | 1.94619564613577e−64 |
| 11 | NZ_GG749218 | Escherichia coli FVEC1412 genomic scaffold supercont1.13: | 1.86737834552034e−63 |
| | | NZ_GG749218 | |
| 12 | NC_013717 | Citrobacter rodentium ICC168 plasmid pCROD1: NC_013717 | 7.42780365363135e−62 |
| 13 | NC_013717 | Citrobacter rodentium ICC168 plasmid pCROD1: NC_013717 | 3.07751376659308e−61 |
| 14 | NZ_ADWS01000089 | Escherichia coli MS 145-7 E_coliMS145-7-1.0.1_Cont88.1: | 1.7351795845908e−60 |
| | | NZ_ADWS01000089 | |
| 15 | NC_011751 | Escherichia coli UMN026: NC_011751 | 2.44317906034667e−60 |
| 16 | NC_011751 | Escherichia coli UMN026: NC_011751 | 6.73588199342071e−60 |
| 17 | NZ_ADWV01000056 | Escherichia coli MS 107-1 E_coliMS107-1-1.0.1_Cont55.1: | 2.62943019143703e−59 |
| | | NZ_ADWV01000056 | |
| 18 | NC_010488 | Escherichia coli SECEC SMS-3-5 plasmid pSMS35_130: | 3.46702381924878e−47 |
| | | NC_010488 | |
| 19 | NZ_ADTM01000311 | Escherichia coli MS 182-1 E_coli182-1-1.0_Cont460.3: | 4.65308035729244e−46 |
| | | NZ_ADTM01000311 | |
| 20 | NZ_ADWS01000095 | Escherichia coli MS 145-7 E_coliMS145-7-1.0.1_Cont94.1: | 7.71451120848483e−46 |
| | | NZ_ADWS01000095 | |
| 21 | NZ_ADTM01000311 | Escherichia coli MS 182-1 E_coli182-1-1.0_Cont460.3: | 1.08551755499227e−44 |
| | | NZ_ADTM01000311 | |
| 22 | NC_009650 | Klebsiella pneumoniae subsp. pneumoniae MGH 78578 plasmid | 4.89761264283562e−44 |
| | | pKPN4: NC_009650 | |
| 23 | NZ_ADWV01000017 | Escherichia coli MS 107-1 E_coliMS107-1-1.0.1_Cont16.1: | 6.97693050178087e−44 |
| | | NZ_ADWV01000017 | |
| 24 | NC_009650 | Klebsiella pneumoniae subsp. pneumoniae MGH 78578 plasmid | 9.68294892967391e−44 |
| | | pKPN4: NC_009650 | |
| 25 | NZ_GG665811 | Escherichia sp. 1_1_43 genomic scaffold supercont1.1: | 3.5843867496487e−43 |
| | | NZ_GG665811 | |
| 26 | NZ_ADTL01000051 | Escherichia coli MS 115-1 E_coli115-1-1.0_Cont158.2: | 3.5843867496487e−43 |
| | | NZ_ADTL01000051 | |
| 27 | AP011957 | Salmonella enterica subsp. enterica serovar Typhimurium | 5.53805522527039e−43 |
| | | str. T000240 DNA: AP011957 | |
| 28 | NC_011282 | Klebsiella pneumoniae 342 plasmid pKP187: NC_011282 | 2.71226651272988e−42 |
| 29 | NZ_ABHR01000011 | Escherichia coli O157:H7 str. EC4401, unfinished sequence: | 8.45082785112866e−42 |
| | | NZ_ABHR01000011 | |
| 30 | NC_010488 | Escherichia coli SECEC SMS-3-5 plasmid pSMS35_130: | 1.02749291231853e−41 |
| | | NC_010488 | |
| 31 | NZ_AFBO01000013 | Klebsiella sp. MS 92-3 K_spMS92-3-l.0_Cont24.1: | 1.46909169086738e−41 |
| | | NZ_AFBO01000013 | |
| 32 | CP002797 | Escherichia coli NA114: CP002797 | 2.43588122712712e−41 |
| 33 | NZ_ABHK01000002 | Escherichia coli O157:H7 str. EC4206, unfinished sequence: | 2.60702932643171e−41 |
| | | NZ_ABHK01000002 | |
| 34 | NZ_GG657366 | Citrobacter sp. 30_2 genomic scaffold supercont1.1: | 2.60702932643171e−41 |
| | | NZ_GG657366 | |
| 35 | NC_011353 | Escherichia coli O157:H7 str. EC4115: NC_011353 | 2.60702932643171e−41 |
| 36 | NZ_ABWL01000012 | Citrobacter youngae ATCC 29220 C_sp-1.0_Cont2.3: | 3.21133372679738e−41 |
| | | NZ_ABWL01000012 | |
| 37 | AP009378 | Escherichia coli SE15 DNA: AP009378 | 3.68640118720819e−41 |
| 38 | NZ_ACXN01000074 | Escherichia coli O157:H7 str. FRIK966: NZ_ACXN01000074 | 5.75695041652081e−41 |
| 39 | NC_007384 | Shigella sonnei Ss046: NC_007384 | 6.75951367822551e−41 |
| 40 | NZ_ABWL01000012 | Citrobacter youngae ATCC 29220 C_sp-1.0_Cont2.3: | 8.12681193093067e−41 |
| | | NZ_ABWL01000012 | |
| 41 | NZ_ADTL01000083 | Escherichia coli MS 115-1 E_coli115-1-1.0_Cont264.1: | 8.12681193093067e−41 |
| | | NZ_ADTL01000083 | |
| 42 | AC_000091 | Escherichia coli W3110 DNA: AC_000091 | 8.12681193093067e−41 |
| 43 | NZ_ADUD01000537 | Escherichia coli MS 196-1 E_coli196-1-1.0_Cont1482.1: | 1.06521634399457e−40 |
| | | NZ_ADUD01000537 | |
| 44 | NC_011083 | Salmonella enterica subsp. enterica serovar Heidelberg | 1.84998224240006e−40 |
| | | str. SL476: NC_011083 | |
| 45 | CP001383 | Shigella flexneri 2002017: CP001383 | 1.89942261631873e−40 |
| 46 | NZ_ADTR01000134 | Escherichia coli MS 21-1 E_coli21-1-1.0_Cont296.1: | 3.35939290103889e−40 |
| | | NZ_ADTR01000134 | |
| 47 | NC_009650 | Klebsiella pneumoniae subsp. pneumoniae MGH 78578 plasmid | 3.76989142366575e−40 |
| | | pKPN4: NC_009650 | |
| 48 | NC_004851 | Shigella flexneri 2a str. 301 plasmid pCP301: NC_004851 | 8.68449218790606e−39 |
| 49 | NC_007607 | Shigella dysenteriae Sd197 plasmid pSD1_197: NC_007607 | 2.27746826869945e−38 |
| 50 | NZ_ADTL01000280 | Escherichia coli MS 115-1 E_coli115-1-1.0_Cont677.5: | 4.92053652141975e−38 |
| | | NZ_ADTL01000280 | |

TABLE 8b
Data for Escherichia, particularly E. coli (continued)

| No. | sign_phenos | sign_phenos_class | best_pheno | best_pheno_class |
|---|---|---|---|---|
| 1 | AM; A/S; AUG; CAX; CP; CRM; GM; LVX; TO; T/S | aminoglycoside; fluoroquinolone; lactam; other | AM | lactam |
| 2 | AM; A/S; AUG; AZ T; CAX; CFT; CP; CRM; GM; LVX; | aminoglycoside; fluoroquinolone; lactam; other | T/S | other |
| | TO; T/S | | | |
| 3 | AM; A/S; AUG; AZT; CAX; CFT; CP; CRM; GM; LVX; | aminoglycoside; fluoroquinolone; lactam; other | T/S | other |
| | TO; T/S | | | |
| 4 | AM; A/S; AUG; AZT; CAX; CFT; CP; CRM; GM; LVX; | aminoglycoside; fluoroquinolone; lactam; other | T/S | other |
| | TO; T/S | | | |
| 5 | AM; A/S; AUG; AZT; CAX; CFT; CP; CRM; GM; LVX; | aminoglycoside; fluoroquinolone; lactam; other | T/S | other |
| | TO; T/S | | | |
| 6 | AM; A/S; AUG; AZT; CAX; CFT; CP; CRM; GM; LVX; | aminoglycoside; fluoroquinolone; lactam; other | T/S | other |
| | TO; T/S | | | |
| 7 | AM; A/S; AUG; AZT; CAX; CFT; CP; CRM; GM; LVX; | aminoglycoside; fluoroquinolone; lactam; other | T/S | other |
| | TO; T/S | | | |
| 8 | AM; A/S; AUG; AZT; CAX; CFT; CP; CRM; GM; LVX; | aminoglycoside; fluoroquinolone; lactam; other | T/S | other |
| | TO; T/S | | | |
| 9 | AM; A/S; AUG; AZT; CAX; CFT; CP; CRM; GM; LVX; | aminoglycoside; fluoroquinolone; lactam; other | T/S | other |
| | TO; T/S | | | |
| 10 | AM; A/S; AUG; AZT; CAX; CFT; CP; CRM; GM; LVX; | aminoglycoside; fluoroquinolone; lactam; other | T/S | other |
| | TO; T/S | | | |
| 11 | AM; A/S; AUG; AZT; CAX; CFT; CP; CRM; GM; LVX; | aminoglycoside; fluoroquinolone; lactam; other | T/S | other |
| | TO; T/S | | | |
| 12 | AM; A/S; AUG; AZT; CAX; CFT; CP; CRM; GM; LVX; | aminoglycoside; fluoroquinolone; lactam; other | LVX | fluoroquinolone |
| | TO; T/S | | | |
| 13 | AM; A/S; AUG; AZT; CAX; CFT; CP; CRM; GM; LVX; | aminoglycoside; fluoroquinolone; lactam; other | LVX | fluoroquinolone |
| | TO; T/S | | | |
| 14 | AM; A/S; AUG; AZT; CAX; CFT; CP; CRM; GM; LVX; | aminoglycoside; fluoroquinolone; lactam; other | T/S | other |
| | TO; T/S | | | |
| 15 | AM; A/S; AUG; AZT; CAX; CFT; CP; CRM; GM; LVX; | aminoglycoside; fluoroquinolone; lactam; other | T/S | other |
| | TO; T/S | | | |
| 16 | AM; A/S; AUG; AZT; CAX; CFT; CP; CRM; GM; LVX; | aminoglycoside; fluoroquinolone; lactam; other | T/S | other |
| | TO; T/S | | | |
| 17 | AM; A/S; AUG; AZT; CAX; CFT; CP; CRM; GM; LVX; | aminoglycoside; fluoroquinolone; lactam; other | T/S | other |
| | TO; T/S | | | |
| 18 | AM; A/S; AUG; AZT; CAX; CFT; CP; CRM; GM; LVX; | aminoglycoside; fluoroquinolone; lactam; other | T/S | other |
| | TO; T/S | | | |
| 19 | AM; A/S; AUG; AZT; CAX; CFT; CP; CRM; GM; LVX; | aminoglycoside; fluoroquinolone; lactam; other | CAX | lactam |
| | TO; T/S | | | |
| 20 | AM; A/S; AUG; AZT; CAX; CFT; CP; CRM; GM; LVX; | aminoglycoside; fluoroquinolone; lactam; other | T/S | other |
| | TO; T/S | | | |
| 21 | AM; A/S; AUG; AZT; CAX; CFT; CP; CRM; GM; LVX; | aminoglycoside; fluoroquinolone; lactam; other | AM | lactam |
| | TO; T/S | | | |
| 22 | AM; A/S; AUG; CAX; CFT; CP; CRM; GM; LVX; TO; | aminoglycoside; fluoroquinolone; lactam; other | T/S | other |
| | T/S | | | |
| 23 | AM; A/S; AUG; AZT; CAX; CFT; CP; CRM; GM; LVX; | aminoglycoside; fluoroquinolone; lactam; other | T/S | other |
| | T/S | | | |
| 24 | AM; A/S; AUG; AZT; CAX; CFT; CP; CRM; GM; TO; | aminoglycoside; fluoroquinolone; lactam; other | T/S | other |
| | T/S | | | |
| 25 | AM; AUG; AZT; CAX; CFT; CP; CRM; GM; LVX; TO; | aminoglycoside; fluoroquinolone; lactam; other | LVX | fluoroquinolone |
| | T/S | | | |
| 26 | AM; AUG; AZT; CAX; CFT; CP; CRM; GM; LVX; TO; | aminoglycoside; fluoroquinolone; lactam; other | LVX | fluoroquinolone |
| | T/S | | | |
| 27 | AM; A/S; AUG; CAX; CFT; CP; CRM; GM; LVX; T/S | aminoglycoside; fluoroquinolone; lactam; other | T/S | other |
| 28 | AM; A/S; AUG; AZT; CAX; CFT; CP; CRM; GM; LVX; | aminoglycoside; fluoroquinolone; lactam; other | LVX | fluoroquinolone |
| | TO; T/S | | | |
| 29 | AM; A/S; AUG; AZT; CAX; CFT; CP; CRM; GM; LVX; | aminoglycoside; fluoroquinolone; lactam; other | CP | fluoroquinolone |
| | TO; T/S | | | |
| 30 | AM; A/S; AUG; AZT; CAX; CFT; CP; CRM; GM; LVX; | aminoglycoside; fluoroquinolone; lactam; other | LVX | fluoroquinolone |
| | TO; T/S | | | |
| 31 | AM; A/S; AUG; AZT; CAX; CFT; CP; CRM; GM; LVX; | aminoglycoside; fluoroquinolone; lactam; other | LVX | fluoroquinolone |
| | TO; T/S | | | |
| 32 | AM; A/S; AUG; AZT; CAX; CFT; CP; CRM; GM; LVX; | aminoglycoside; fluoroquinolone; lactam; other | LVX | fluoroquinolone |
| | TO; T/S | | | |
| 33 | AM; A/S; AUG; AZT; CAX; CFT; CP; CRM; GM; LVX; | aminoglycoside; fluoroquinolone; lactam; other | LVX | fluoroquinolone |
| | TO; T/S | | | |
| 34 | AM; A/S; AUG; AZT; CAX; CFT; CP; CRM; GM; LVX; | aminoglycoside; fluoroquinolone; lactam; other | LVX | fluoroquinolone |
| | TO; T/S | | | |
| 35 | AM; A/S; AUG; AZT; CAX; CFT; CP; CRM; GM; LVX; | aminoglycoside; fluoroquinolone; lactam; other | LVX | fluoroquinolone |
| | TO; T/S | | | |
| 36 | AM; A/S; AUG; AZT; CAX; CFT; CP; CRM; GM; LVX; | aminoglycoside; fluoroquinolone; lactam; other | LVX | fluoroquinolone |
| | TO; T/S | | | |
| 37 | AM; A/S; AUG; AZT; CAX; CFT; CP; CRM; GM; LVX; | aminoglycoside; fluoroquinolone; lactam; other | LVX | fluoroquinolone |
| | TO; T/S | | | |
| 38 | AM; A/S; AUG; AZT; CAX; CFT; CP; CRM; GM; LVX; | aminoglycoside; fluoroquinolone; lactam; other | CP | fluoroquinolone |
| | TO; T/S | | | |
| 39 | AM; A/S; AUG; AZT; CAX; CFT; CP; CRM; GM; LVX; | aminoglycoside; fluoroquinolone; lactam; other | LVX | fluoroquinolone |
| | TO; T/S | | | |
| 40 | AM; A/S; AUG; AZT; CAX; CFT; CP; CRM; GM; LVX; | aminoglycoside; fluoroquinolone; lactam; other | LVX | fluoroquinolone |
| | TO; T/S | | | |
| 41 | AM; A/S; AUG; AZT; CAX; CFT; CP; CRM; GM; LVX; | aminoglycoside; fluoroquinolone; lactam; other | LVX | fluoroquinolone |
| | TO; T/S | | | |
| 42 | AM; A/S; AUG; AZT; CAX; CFT; CP; CRM; GM; LVX; | aminoglycoside; fluoroquinolone; lactam; other | LVX | fluoroquinolone |
| | TO; T/S | | | |
| 43 | AM; A/S; AUG; AZT; CAX; CFT; CP; CRM; GM; T/S | aminoglycoside; fluoroquinolone; lactam; other | T/S | other |
| 44 | AM; A/S; AUG; AZT; CAX; CFT; CP; C RM; GM; LVX; | aminoglycoside; fluoroquinolone; lactam; other | LVX | fluoroquinolone |
| | TO; T/S | | | |
| 45 | AM; A/S; AUG; AZT; CAX; CFT; CP; C RM; GM; LVX; | aminoglycoside; fluoroquinolone; lactam; other | LVX | fluoroquinolone |
| | TO; T/S | | | |
| 46 | AM; A/S; AUG; AZT; CAX; CFT; CP; CRM; GM; LVX; | aminoglycoside; fluoroquinolone; lactam; other | LVX | fluoroquinolone |
| | TO; T/S | | | |
| 47 | AM; A/S; AUG; T/S | lactam; other | T/S | other |
| 48 | AM; A/S; AUG; AZT; CAX; CFT; CP; CRM; GM; LVX; | aminoglycoside; fluoroquinolone; lactam; other | LVX | fluoroquinolone |
| | TO; T/S | | | |
| 49 | AM; A/S; AUG; AZT; CAX; CFT; CP; CRM; GM; LVX; | aminoglycoside; fluoroquinolone; lactam; other | LVX | fluoroquinolone |
| | TO; T/S | | | |
| 50 | AM; A/S; AUG; AZT; CAX; CFT; CP; CRM; GM; LVX; | aminoglycoside; fluoroquinolone; lactam; other | LVX | fluoroquinolone |
| | TO; T/S | | | |

TABLE 8c
Data for Escherichia, particularly E. coli (continued)

| No. | num_aminoglycoside | num_fluoroquinolone | num_lactam | num_other |
|---|---|---|---|---|
| 1 | 2 | 2 | 5 | 1 |
| 2 | 2 | 2 | 7 | 1 |
| 3 | 2 | 2 | 7 | 1 |
| 4 | 2 | 2 | 7 | 1 |
| 5 | 2 | 2 | 7 | 1 |
| 6 | 2 | 2 | 7 | 1 |
| 7 | 2 | 2 | 7 | 1 |
| 8 | 2 | 2 | 7 | 1 |
| 9 | 2 | 2 | 7 | 1 |
| 10 | 2 | 2 | 7 | 1 |
| 11 | 2 | 2 | 7 | 1 |
| 12 | 2 | 2 | 7 | 1 |
| 13 | 2 | 2 | 7 | 1 |
| 14 | 2 | 2 | 7 | 1 |
| 15 | 2 | 2 | 7 | 1 |
| 16 | 2 | 2 | 7 | 1 |
| 17 | 2 | 2 | 7 | 1 |
| 18 | 2 | 2 | 7 | 1 |
| 19 | 2 | 2 | 7 | 1 |
| 20 | 2 | 2 | 7 | 1 |
| 21 | 2 | 2 | 7 | 1 |
| 22 | 2 | 2 | 6 | 1 |
| 23 | 1 | 2 | 7 | 1 |
| 24 | 2 | 1 | 7 | 1 |
| 25 | 2 | 2 | 6 | 1 |
| 26 | 2 | 2 | 6 | 1 |
| 27 | 1 | 2 | 6 | 1 |
| 28 | 2 | 2 | 7 | 1 |
| 29 | 2 | 2 | 7 | 1 |
| 30 | 2 | 2 | 7 | 1 |
| 31 | 2 | 2 | 7 | 1 |
| 32 | 2 | 2 | 7 | 1 |
| 33 | 2 | 2 | 7 | 1 |
| 34 | 2 | 2 | 7 | 1 |
| 35 | 2 | 2 | 7 | 1 |
| 36 | 2 | 2 | 7 | 1 |
| 37 | 2 | 2 | 7 | 1 |
| 38 | 2 | 2 | 7 | 1 |
| 39 | 2 | 2 | 7 | 1 |
| 40 | 2 | 2 | 7 | 1 |
| 41 | 2 | 2 | 7 | 1 |
| 42 | 2 | 2 | 7 | 1 |
| 43 | 1 | 1 | 7 | 1 |
| 44 | 2 | 2 | 7 | 1 |
| 45 | 2 | 2 | 7 | 1 |
| 46 | 2 | 2 | 7 | 1 |
| 47 | 0 | 0 | 3 | 1 |
| 48 | 2 | 2 | 7 | 1 |
| 49 | 2 | 2 | 7 | 1 |
| 50 | 2 | 2 | 7 | 1 |

TABLE 8d
Data for Escherichia, particularly E. coli (continued)

| No. | AM_pv_adj | A/S_pv_adj | AUG_pv_adj | AZT_pv_adj |
|---|---|---|---|---|
| 1 | 3.50E−207 | 1.39E−175 | 2.23E−54 | 1.94E−02 |
| 2 | 3.12E−58 | 4.85E−48 | 1.56E−20 | 2.24E−14 |
| 3 | 2.85E−46 | 1.23E−39 | 2.49E−17 | 7.44E−15 |
| 4 | 2.62E−45 | 3.93E−39 | 1.12E−17 | 7.82E−14 |
| 5 | 1.01E−26 | 2.48E−22 | 5.21E−09 | 2.11E−04 |
| 6 | 4.88E−38 | 1.20E−35 | 3.67E−16 | 6.67E−10 |
| 7 | 2.35E−59 | 7.04E−49 | 2.73E−24 | 1.89E−06 |
| 8 | 2.35E−59 | 7.04E−49 | 1.31E−23 | 5.63E−06 |
| 9 | 1.84E−24 | 1.82E−23 | 1.33E−10 | 1.05E−06 |
| 10 | 2.51E−64 | 6.77E−56 | 3.88E−22 | 9.19E−04 |
| 11 | 2.79E−25 | 9.09E−23 | 1.32E−08 | 1.48E−03 |
| 12 | 2.94E−45 | 2.43E−34 | 1.15E−22 | 2.63E−14 |
| 13 | 1.58E−45 | 1.72E−34 | 1.75E−22 | 1.91E−14 |
| 14 | 3.26E−28 | 1.85E−21 | 2.00E−08 | 1.16E−05 |
| 15 | 1.44E−20 | 2.94E−18 | 5.11E−07 | 1.25E−04 |
| 16 | 6.63E−29 | 5.38E−22 | 1.16E−08 | 1.11E−05 |
| 17 | 6.41E−30 | 1.52E−22 | 9.58E−09 | 6.45E−06 |
| 18 | 4.62E−35 | 3.20E−30 | 5.19E−17 | 2.18E−07 |
| 19 | 1.82E−09 | 8.62E−11 | 2.50E−17 | 1.74E−39 |
| 20 | 3.88E−27 | 4.06E−27 | 4.62E−12 | 9.38E−06 |
| 21 | 1.09E−44 | 2.09E−39 | 1.05E−16 | 2.10E−06 |
| 22 | 2.75E−28 | 8.80E−22 | 3.79E−08 | 1.79E−02 |
| 23 | 6.10E−28 | 3.56E−20 | 2.25E−09 | 8.28E−04 |
| 24 | 5.97E−23 | 1.19E−15 | 1.39E−06 | 1.28E−03 |
| 25 | 4.17E−03 | 3.66E−02 | 4.90E−07 | 1.65E−14 |
| 26 | 4.17E−03 | 3.66E−02 | 4.90E−07 | 1.65E−14 |
| 27 | 1.37E−28 | 1.45E−21 | 8.41E−09 | 2.36E−02 |
| 28 | 5.88E−10 | 1.33E−07 | 1.85E−09 | 7.58E−11 |
| 29 | 1.14E−08 | 2.28E−05 | 5.66E−08 | 3.43E−16 |
| 30 | 1.96E−09 | 3.67E−07 | 4.28E−09 | 1.44E−10 |
| 31 | 2.88E−09 | 5.08E−07 | 4.50E−09 | 1.51E−10 |
| 32 | 1.07E−10 | 2.85E−08 | 1.31E−06 | 4.19E−06 |
| 33 | 4.32E−08 | 6.04E−05 | 1.49E−07 | 4.44E−16 |
| 34 | 8.33E−08 | 9.79E−05 | 2.97E−07 | 4.44E−16 |
| 35 | 8.33E−08 | 9.79E−05 | 2.97E−07 | 4.44E−16 |
| 36 | 3.07E−08 | 4.70E−05 | 1.02E−07 | 7.64E−16 |
| 37 | 4.14E−12 | 7.23E−10 | 1.20E−05 | 1.17E−03 |
| 38 | 1.57E−07 | 1.55E−04 | 4.17E−07 | 7.80E−16 |
| 39 | 2.15E−07 | 1.95E−04 | 5.61E−07 | 8.13E−16 |
| 40 | 1.55E−07 | 1.54E−04 | 3.95E−07 | 8.67E−16 |
| 41 | 1.55E−07 | 1.54E−04 | 3.95E−07 | 8.67E−16 |
| 42 | 1.55E−07 | 1.54E−04 | 3.95E−07 | 8.67E−16 |
| 43 | 3.13E−28 | 1.97E−20 | 2.60E−09 | 3.55E−04 |
| 44 | 1.16E−10 | 3.41E−08 | 3.47E−07 | 2.45E−06 |
| 45 | 2.72E−09 | 3.18E−07 | 2.44E−07 | 1.12E−10 |
| 46 | 2.66E−09 | 8.84E−08 | 1.21E−05 | 1.64E−08 |
| 47 | 4.47E−24 | 6.61E−18 | 2.77E−06 | 2.45E−01 |
| 48 | 2.16E−06 | 8.47E−04 | 1.36E−06 | 7.02E−16 |
| 49 | 4.99E−06 | 1.53E−03 | 2.46E−06 | 1.26E−15 |
| 50 | 1.11E−05 | 1.86E−03 | 1.74E−06 | 1.63E−14 |

TABLE 8e
Data for Escherichia, particularly E. coli (continued)

| No. | CAX_pv_adj | CFT_pv_adj | CP_pv_adj | CRM_pv_adj |
|---|---|---|---|---|
| 1 | 9.08E−03 | 5.54E−02 | 2.29E−17 | 2.63E−05 |
| 2 | 4.55E−21 | 9.31E−20 | 3.14E−43 | 1.15E−19 |
| 3 | 4.33E−19 | 1.87E−17 | 1.53E−32 | 5.07E−17 |
| 4 | 6.85E−18 | 2.28E−16 | 6.99E−31 | 7.62E−16 |
| 5 | 2.25E−06 | 3.51E−06 | 1.44E−38 | 1.55E−08 |
| 6 | 3.18E−15 | 1.35E−14 | 4.48E−11 | 1.70E−12 |
| 7 | 2.34E−05 | 5.15E−06 | 1.74E−15 | 7.72E−10 |
| 8 | 5.80E−05 | 9.14E−06 | 6.46E−15 | 2.18E−09 |
| 9 | 6.82E−10 | 3.64E−09 | 1.69E−49 | 1.37E−10 |
| 10 | 5.59E−03 | 1.88E−03 | 1.12E−09 | 2.39E−05 |
| 11 | 9.17E−05 | 2.37E−04 | 1.28E−36 | 6.73E−06 |
| 12 | 8.04E−16 | 5.19E−14 | 7.03E−61 | 9.05E−21 |
| 13 | 5.55E−16 | 2.31E−14 | 2.47E−60 | 6.03E−21 |
| 14 | 5.30E−07 | 2.10E−06 | 1.38E−39 | 8.69E−08 |
| 15 | 1.67E−06 | 3.95E−06 | 1.23E−38 | 5.25E−08 |
| 16 | 4.67E−07 | 1.87E−06 | 6.39E−39 | 5.20E−08 |
| 17 | 4.17E−07 | 1.68E−06 | 2.84E−39 | 4.28E−08 |
| 18 | 5.95E−11 | 4.86E−10 | 4.79E−07 | 1.46E−09 |
| 19 | 4.65E−46 | 9.26E−45 | 3.20E−19 | 1.06E−36 |
| 20 | 5.55E−08 | 2.77E−08 | 8.59E−09 | 1.64E−09 |
| 21 | 4.89E−09 | 9.33E−07 | 3.24E−25 | 8.32E−08 |
| 22 | 8.50E−03 | 9.80E−03 | 5.28E−05 | 4.13E−03 |
| 23 | 4.82E−05 | 7.11E−05 | 5.83E−03 | 5.89E−04 |
| 24 | 1.31E−04 | 1.77E−04 | 7.59E−03 | 2.84E−03 |
| 25 | 2.32E−15 | 2.75E−17 | 6.79E−43 | 2.56E−16 |
| 26 | 2.32E−15 | 2.75E−17 | 6.79E−43 | 2.56E−16 |
| 27 | 3.66E−03 | 4.47E−03 | 4.75E−03 | 2.48E−03 |
| 28 | 6.25E−11 | 6.54E−10 | 4.02E−42 | 2.80E−12 |
| 29 | 6.60E−17 | 2.67E−17 | 8.45E−42 | 2.23E−17 |
| 30 | 7.29E−11 | 7.76E−10 | 1.57E−41 | 5.31E−12 |
| 31 | 7.91E−11 | 8.46E−10 | 2.18E−41 | 1.70E−11 |
| 32 | 4.29E−06 | 1.52E−06 | 1.28E−40 | 1.80E−07 |
| 33 | 1.31E−16 | 5.36E−17 | 3.96E−41 | 4.26E−17 |
| 34 | 1.31E−16 | 5.36E−17 | 3.96E−41 | 4.26E−17 |
| 35 | 1.31E−16 | 5.36E−17 | 3.96E−41 | 4.26E−17 |
| 36 | 1.43E−16 | 5.77E−17 | 4.56E−41 | 1.17E−17 |
| 37 | 6.46E−05 | 1.74E−04 | 2.25E−40 | 1.80E−06 |
| 38 | 2.55E−16 | 1.06E−16 | 5.76E−41 | 7.39E−17 |
| 39 | 2.58E−16 | 1.06E−16 | 1.05E−40 | 7.84E−17 |
| 40 | 2.68E−16 | 1.10E−16 | 1.19E−40 | 2.23E−17 |
| 41 | 2.68E−16 | 1.10E−16 | 1.19E−40 | 2.23E−17 |
| 42 | 2.68E−16 | 1.10E−16 | 1.19E−40 | 2.23E−17 |
| 43 | 1.90E−05 | 2.89E−05 | 6.00E−03 | 1.99E−04 |
| 44 | 1.84E−06 | 5.25E−07 | 1.05E−39 | 6.76E−08 |
| 45 | 8.60E−10 | 4.43E−09 | 9.49E−40 | 8.85E−14 |
| 46 | 2.36E−11 | 1.27E−10 | 4.92E−38 | 2.22E−11 |
| 47 | 1.07E−01 | 1.14E−01 | 1.50E−02 | 6.49E−02 |
| 48 | 4.02E−16 | 1.67E−16 | 1.34E−38 | 7.42E−18 |
| 49 | 4.46E−16 | 1.95E−16 | 3.53E−38 | 1.42E−17 |
| 50 | 4.97E−15 | 2.04E−15 | 7.83E−38 | 2.27E−17 |

TABLE 8f
Data for Escherichia, particularly E. coli (continued)

| No. | GM_pv_adj | LVX_pv_adj | TO_pv_adj | T/S_pv_adj |
|---|---|---|---|---|
| 1 | 2.40E−14 | 2.96E−16 | 6.56E−10 | 5.59E−55 |
| 2 | 9.02E−31 | 5.84E−43 | 3.02E−26 | 1.62E−119 |
| 3 | 3.09E−28 | 1.25E−33 | 1.52E−27 | 6.25E−97 |
| 4 | 1.19E−27 | 5.56E−32 | 5.30E−27 | 8.78E−96 |
| 5 | 2.33E−13 | 1.57E−38 | 6.37E−15 | 7.68E−72 |
| 6 | 4.17E−11 | 5.22E−11 | 1.79E−08 | 1.58E−71 |
| 7 | 7.23E−11 | 6.17E−14 | 8.00E−05 | 1.01E−69 |
| 8 | 2.80E−10 | 1.39E−13 | 8.00E−05 | 1.23E−68 |
| 9 | 1.18E−18 | 2.49E−49 | 2.67E−22 | 6.77E−68 |
| 10 | 7.65E−07 | 1.10E−08 | 7.07E−03 | 1.95E−64 |
| 11 | 1.21E−16 | 1.92E−37 | 4.13E−18 | 1.87E−63 |
| 12 | 4.86E−26 | 7.43E−62 | 5.25E−32 | 2.58E−39 |
| 13 | 2.72E−26 | 3.08E−61 | 2.92E−32 | 4.30E−39 |
| 14 | 1.39E−16 | 1.68E−39 | 1.59E−17 | 1.74E−60 |
| 15 | 5.78E−18 | 2.01E−39 | 1.91E−19 | 2.44E−60 |
| 16 | 1.02E−16 | 7.87E−39 | 1.17E−17 | 6.74E−60 |
| 17 | 7.38E−17 | 3.56E−39 | 8.56E−18 | 2.63E−59 |
| 18 | 6.73E−07 | 9.82E−07 | 5.94E−07 | 3.47E−47 |
| 19 | 5.34E−12 | 1.45E−19 | 7.00E−09 | 2.74E−06 |
| 20 | 3.89E−07 | 1.14E−08 | 2.09E−05 | 7.71E−46 |
| 21 | 6.04E−13 | 2.10E−24 | 3.47E−12 | 1.02E−37 |
| 22 | 8.52E−06 | 1.56E−04 | 7.54E−03 | 4.90E−44 |
| 23 | 9.39E−05 | 9.80E−03 | 1.28E−02 | 6.98E−44 |
| 24 | 2.16E−04 | 1.65E−02 | 9.49E−03 | 9.68E−44 |
| 25 | 1.81E−12 | 3.58E−43 | 2.05E−13 | 2.13E−06 |
| 26 | 1.81E−12 | 3.58E−43 | 2.05E−13 | 2.13E−06 |
| 27 | 1.08E−04 | 8.15E−03 | 5.44E−02 | 5.54E−43 |
| 28 | 1.81E−12 | 2.71E−42 | 4.67E−11 | 6.64E−17 |
| 29 | 3.65E−19 | 9.37E−42 | 2.80E−17 | 3.20E−18 |
| 30 | 3.61E−12 | 1.03E−41 | 9.37E−11 | 2.18E−16 |
| 31 | 3.86E−12 | 1.47E−41 | 9.73E−11 | 2.45E−16 |
| 32 | 1.03E−13 | 2.44E−41 | 2.22E−16 | 4.82E−04 |
| 33 | 4.79E−19 | 2.61E−41 | 5.83E−17 | 9.95E−18 |
| 34 | 4.79E−19 | 2.61E−41 | 5.83E−17 | 3.03E−17 |
| 35 | 4.79E−19 | 2.61E−41 | 5.83E−17 | 3.03E−17 |
| 36 | 8.47E−19 | 3.21E−41 | 6.04E−17 | 3.36E−18 |
| 37 | 3.56E−12 | 3.69E−41 | 8.59E−15 | 1.04E−04 |
| 38 | 8.74E−19 | 6.20E−41 | 6.42E−17 | 5.21E−17 |
| 39 | 9.35E−19 | 6.76E−41 | 6.96E−17 | 8.31E−17 |
| 40 | 1.03E−18 | 8.13E−41 | 1.27E−16 | 2.95E−17 |
| 41 | 1.03E−18 | 8.13E−41 | 1.27E−16 | 2.95E−17 |
| 42 | 1.03E−18 | 8.13E−41 | 1.27E−16 | 2.95E−17 |
| 43 | 9.79E−05 | 1.29E−02 | 1.33E−02 | 1.07E−40 |
| 44 | 1.98E−13 | 1.85E−40 | 4.73E−16 | 4.17E−04 |
| 45 | 2.68E−16 | 1.90E−40 | 1.10E−17 | 2.80E−08 |
| 46 | 1.27E−13 | 3.36E−40 | 7.14E−14 | 3.41E−07 |
| 47 | 1.15E−02 | 2.48E−02 | 4.44E−01 | 3.77E−40 |
| 48 | 1.50E−18 | 8.68E−39 | 9.76E−17 | 2.56E−15 |
| 49 | 3.08E−18 | 2.28E−38 | 1.98E−16 | 1.91E−14 |
| 50 | 2.46E−16 | 4.92E−38 | 8.76E−15 | 4.31E−13 |

TABLE 8g
Data for Escherichia, particularly E. coli (continued)

| No. | Locus.Tag | Gene.Symbol | GenBank.Accession | Chromosome |
|---|---|---|---|---|
| 1 | SeHA_C1580 | blaT | YP_002045448 | |
| 2 | EcolB7_01001258 | | ZP_00717086 | |
| 3 | HMPREF9345_05066 | | ZP_07100147 | |
| 4 | KPN_pKPN5p08201 | | YP_001338811 | plasmid pKPN5 |
| 5 | HMPREF9345_05232 | | ZP_07100311 | |
| 6 | EcolB_01004576 | | ZP_00708527 | |
| 7 | pEFER_0049 | | YP_002394596 | plasmid pEFER |
| 8 | ETAE_p040 | | YP_003297634 | plasmid pEIB202 |
| 9 | ECGG_04429 | | ZP_06648541 | |
| 10 | ETAE_p041 | folP | YP_003297635 | plasmid pEIB202 |
| 11 | ECGG_04434 | | ZP_06648545 | |
| 12 | ROD_p1051 | pemI | YP_003368450 | plasmid pCROD1 |
| 13 | ROD_p1061 | pemK | YP_003368451 | plasmid pCROD1 |
| 14 | HMPREF9348_05540 | | ZP_07692671 | |
| 15 | ECUMN_4816 | aadA | YP_002415408 | |
| 16 | ECUMN_4827 | mphA | YP_002415417 | |
| 17 | HMPREF9345_05223 | | ZP_07100302 | |
| 18 | EcSMS35_A0150 | | YP_001740030 | plasmid pSMS35_130 |
| 19 | HMPREF9548_03778 | | ZP_07141582 | |
| 20 | HMPREF9348_05561 | | ZP_07692692 | |
| 21 | HMPREF9548_03784 | | ZP_07141588 | |
| 22 | KPN_pKPN4p07064 | | YP_001338673 | plasmid pKPN4 |
| 23 | HMPREF9345_03525 | | ZP_07098656 | |
| 24 | KPN_pKPN4p07068 | merC | YP_001338677 | plasmid pKPN4 |
| 25 | ESCG_01010 | | ZP_04871321 | |
| 26 | HMPREF9540_00466 | | ZP_07133313 | |
| 27 | STMDT12_C39340 | | BAJ38877 | |
| 28 | KPK_A0022 | sopB | YP_002235674 | plasmid pKP187 |
| 29 | EcoliO157_010100014809 | | ZP_02780941 | |
| 30 | EcSMS35_A0072 | sopB | YP_001739960 | plasmid pSMS35_130 |
| 31 | HMPREF9538_00090 | | ZP_08302456 | |
| 32 | ECNA114_2444 | | AEG37278 | |
| 33 | EschericcoliO157_010100006568 | | ZP_02749755 | |
| 34 | CSAG_00128 | | ZP_04560798 | |
| 35 | ECH74115_0422 | mhpA | YP_002268988 | |
| 36 | CIT292_01335 | | ZP_03835561 | |
| 37 | ECSF_1165 | | BAI54705 | |
| 38 | EscherichiacoliO157EcO_010100009454 | | ZP_05948572 | |
| 39 | SSON_0329 | mhpD | YP_309341 | |
| 40 | CIT292_01336 | | ZP_03835562 | |
| 41 | HMPREF9540_00984 | | ZP_07133822 | |
| 42 | Missing | mhpE | AP_001004 | |
| | locus_tag:AC_000091.cds340.373092..374105 | | | |
| 43 | HMPREF9551_04611 | | ZP_07191964 | |
| 44 | SeHA_C2638 | | YP_002046450 | |
| 45 | SFxv_0758 | | ADA73054 | |
| 46 | HMPREF9530_01431 | | ZP_07151340 | |
| 47 | KPN_pKPN4p07069 | merA | YP_001338678 | plasmid pKPN4 |
| 48 | CP0077 | | NP_858210 | plasmid pCP301 |
| 49 | SDY_P083 | | YP_406084 | plasmid pSD1_197 |
| 50 | HMPREF9540_03398 | | ZP_07136184 | |

TABLE 8h
Data for Escherichia, particularly E. coli (continued)

| No. | Start.Coord | End.Coord | Strand | Scaffold.ID |
|---|---|---|---|---|
| 1 | 1525960 | 1526820 | + | 642555218 |
| 2 | 77515 | 77910 | + | 638358454 |
| 3 | 4715 | 5554 | − | 648294624 |
| 4 | 34908 | 35255 | − | 640753021 |
| 5 | 5252 | 5572 | − | 648294635 |
| 6 | 3555 | 4568 | + | 638359041 |
| 7 | 48658 | 49503 | + | 643692014 |
| 8 | 31237 | 32040 | − | 646311959 |
| 9 | 19278 | 19826 | + | 647536609 |
| 10 | 32101 | 32916 | − | 646311959 |
| 11 | 22618 | 23823 | + | 647536609 |
| 12 | 3339 | 3596 | + | 646311988 |
| 13 | 3529 | 3930 | + | 646311988 |
| 14 | 461 | 1045 | − | 649994953 |
| 15 | 4994882 | 4995670 | + | 644736335 |
| 16 | 5003053 | 5003958 | − | 644736335 |
| 17 | 1167 | 2405 | + | 648294635 |
| 18 | 118542 | 119474 | + | 641522668 |
| 19 | 4493 | 5755 | + | 648288593 |
| 20 | 209 | 661 | + | 649994959 |
| 21 | 8819 | 9535 | + | 648288593 |
| 22 | 23310 | 24614 | − | 640753020 |
| 23 | 1071 | 1307 | − | 648294596 |
| 24 | 25970 | 27664 | − | 640753020 |
| 25 | 241682 | 242032 | + | 646206991 |
| 26 | 192 | 443 | + | 648287910 |
| 27 | 4084530 | 4085237 | − | 651053007 |
| 28 | 12106 | 13071 | − | 643348532 |
| 29 | 123136 | 123969 | − | 641781714 |
| 30 | 53664 | 54635 | − | 641522668 |
| 31 | 5657 | 6832 | + | 651332930 |
| 32 | 2476906 | 2477910 | − | 651053098 |
| 33 | 369676 | 370620 | + | 641780393 |
| 34 | 146099 | 147763 | + | 646206732 |
| 35 | 430810 | 432474 | + | 643348548 |
| 36 | 25505 | 26449 | + | 643891503 |
| 37 | 1248345 | 1249289 | + | 646862305 |
| 38 | 20015 | 20965 | + | 645964942 |
| 39 | 356486 | 357301 | + | 640427102 |
| 40 | 26463 | 27344 | + | 643891503 |
| 41 | 7204 | 8217 | + | 648287942 |
| 42 | 373092 | 374105 | + | 637000000 |
| 43 | 97 | 531 | − | 648293053 |
| 44 | 2550781 | 2552010 | + | 642555218 |
| 45 | 734541 | 734921 | + | 646862363 |
| 46 | 8 | 643 | − | 648290358 |
| 47 | 27716 | 28177 | − | 640753020 |
| 48 | 61397 | 61579 | + | 637000224 |
| 49 | 69343 | 69615 | − | 640427105 |
| 50 | 3415 | 4356 | − | 648288139 |

### Examples 5 and 6

### Klebsiella, particularly K. oxytoca and K. pneumoniae

[0261] The procedure was carried out as in Example 1, except that the following microorganisms were used:

[0262] Bacterial Strains

[0263] The inventors selected 1568 Klebsiella strains, particularly 1179 for Klebsiella pneumonia and 389 for Klebsiella oxytoca, from the microbiology strain collection at Siemens Healthcare Diagnostics (West Sacramento, Calif.) for susceptibility testing and whole genome sequencing.

[0264] From MetaRef, 1640 centroids of Klebsiella species were used as reference sequences for K. oxytoca, and 1641 centroids of K. pneumoniae were uses as reference sequences of K. pneumoniae.

[0265] The results for K. oxytoca are shown in Tables 9 (corresponding to Table 1) and 10 (corresponding to Table 2), and the results for K. pneumonia are shown in Tables 11 (corresponding to Table 1) and 12 (corresponding to Table 2).

TABLE 9a
Data for Klebsiella, particularly K. oxytoca

| No. | Scaffold.External.Accession | Scaffold.Name | best_pv |
|---|---|---|---|
| 1 | NC_011283 | Klebsiella pneumoniae 342: NC_011283 | 7.24545119859105e−19 |
| 2 | NZ_GG745508 | Klebsiella sp. 1_1_55 genomic scaffold supercont1.1: | 7.24545119859105e−19 |
| | | NZ_GG745508 | |
| 3 | NC_011283 | Klebsiella pneumoniae 342: NC_011283 | 1.17347446332913e−17 |
| 4 | NC_015663 | Enterobacter aerogenes KCTC 2190 chromosome: NC_015663 | 9.82145388713083e−17 |
| 5 | NC_013850 | Klebsiella variicola At-22 chromosome: NC_013850 | 4.06768464186916e−16 |
| 6 | NZ_ACZD01000230 | Klebsiella pneumoniae subsp. rhinoscleromatis ATCC 13884 | 4.06768464186916e−16 |
| | | contig00265: NZ_ACZD01000230 | |
| 7 | NC_013850 | Klebsiella variicola At-22 chromosome: NC_013850 | 6.05465029985694e−16 |
| 8 | CP002910 | Klebsiella pneumoniae KCTC 2242: CP002910 | 6.05465029985694e−16 |
| 9 | CP002910 | Klebsiella pneumoniae KCTC 2242: CP002910 | 6.05465029985694e−16 |
| 10 | NZ_GG745509 | Klebsiella sp. 1_1_55 genomic scaffold supercont1.2: | 6.05465029985694e−16 |
| | | NZ_GG745509 | |
| 11 | NZ_GG745508 | Klebsiella sp. 1_1_55 genomic scaffold supercont1.1: | 6.05465029985694e−16 |
| | | NZ_GG745508 | |
| 12 | NC_011283 | Klebsiella pneumoniae 342: NC_011283 | 6.05465029985694e−16 |
| 13 | NC_013850 | Klebsiella variicola At-22 chromosome: NC_013850 | 6.05465029985694e−16 |
| 14 | NC_013850 | Klebsiella variicola At-22 chromosome: NC_013850 | 6.05465029985694e−16 |
| 15 | NC_013850 | Klebsiella variicola At-22 chromosome: NC_013850 | 6.05465029985694e−16 |
| 16 | NC_013850 | Klebsiella variicola At-22 chromosome: NC_013850 | 6.05465029985694e−16 |
| 17 | NC_013850 | Klebsiella variicola At-22 chromosome: NC_013850 | 6.05465029985694e−16 |
| 18 | NZ_GG745512 | Klebsiella sp. 1_1_55 genomic scaffold supercont1.5: | 6.05465029985694e−16 |
| | | NZ_GG745512 | |
| 19 | NC_013850 | Klebsiella variicola At-22 chromosome: NC_013850 | 6.05465029985694e−16 |
| 20 | NC_013850 | Klebsiella variicola At-22 chromosome: NC_013850 | 6.05465029985694e−16 |
| 21 | NZ_GG745508 | Klebsiella sp. 1_1_55 genomic scaffold supercont1.1: | 6.05465029985694e−16 |
| | | NZ_GG745508 | |
| 22 | NC_009648 | Klebsiella pneumoniae subsp. pneumoniae MGH 78578: | 6.05465029985694e−16 |
| | | NC_009648 | |
| 23 | NC_013850 | Klebsiella variicola At-22 chromosome: NC_013850 | 6.05465029985694e−16 |
| 24 | NC_013850 | Klebsiella variicola At-22 chromosome: NC_013850 | 6.05465029985694e−16 |
| 25 | NC_012731 | Klebsiella pneumoniae NTUH-K2044: NC_012731 | 6.05465029985694e−16 |
| 26 | NC_013850 | Klebsiella variicola At-22 chromosome: NC_013850 | 6.05465029985694e−16 |
| 27 | NC_013850 | Klebsiella variicola At-22 chromosome: NC_013850 | 6.05465029985694e−16 |
| 28 | NZ_GG745508 | Klebsiella sp. 1_1_55 genomic scaffold supercont1.1: | 6.05465029985694e−16 |
| | | NZ_GG745508 | |
| 29 | NC_013850 | Klebsiella variicola At-22 chromosome: NC_013850 | 6.05465029985694e−16 |
| 30 | NC_013850 | Klebsiella variicola At-22 chromosome: NC_013850 | 6.05465029985694e−16 |
| 31 | NC_013850 | Klebsiella variicola At-22 chromosome: NC_013850 | 6.05465029985694e−16 |
| 32 | NZ_GG745508 | Klebsiella sp. 1_1_55 genomic scaffold supercont1.1: | 6.05465029985694e−16 |
| | | NZ_GG745508 | |
| 33 | NZ_GG745508 | Klebsiella sp. 1_1_55 genomic scaffold supercont1.1: | 6.05465029985694e−16 |
| | | NZ_GG745508 | |
| 34 | NC_012731 | Klebsiella pneumoniae NTUH-K2044: NC_012731 | 6.05465029985694e−16 |
| 35 | CP002910 | Klebsiella pneumoniae KCTC 2242: CP002910 | 6.05465029985694e−16 |
| 36 | NC_011283 | Klebsiella pneumoniae 342: NC_011283 | 6.05465029985694e−16 |
| 37 | NZ_AFBO01000503 | Klebsiella sp. MS 92-3 K_spMS92-3-1.0_Cont988.13: | 6.05465029985694e−16 |
| | | NZ_AFBO01000503 | |
| 38 | NZ_GG745509 | Klebsiella sp. 1_1_55 genomic scaffold supercont1.2: | 6.05465029985694e−16 |
| | | NZ_GG745509 | |
| 39 | NZ_GG745509 | Klebsiella sp. 1_1_55 genomic scaffold supercont1.2: | 6.05465029985694e−16 |
| | | NZ_GG745509 | |
| 40 | NC_013850 | Klebsiella variicola At-22 chromosome: NC_013850 | 6.05465029985694e−16 |
| 41 | NC_013850 | Klebsiella variicola At-22 chromosome: NC_013850 | 6.05465029985694e−16 |
| 42 | NC_013850 | Klebsiella variicola At-22 chromosome: NC_013850 | 6.05465029985694e−16 |
| 43 | NC_009648 | Klebsiella pneumoniae subsp. pneumoniae MGH 78578: | 6.05465029985694e−16 |
| | | NC_009648 | |
| 44 | NZ_GG745509 | Klebsiella sp. 1_1_55 genomic scaffold supercont1.2: | 6.05465029985694e−16 |
| | | NZ_GG745509 | |
| 45 | NC_013850 | Klebsiella variicola At-22 chromosome: NC_013850 | 6.05465029985694e−16 |
| 46 | NC_013850 | Klebsiella variicola At-22 chromosome: NC_013850 | 6.05465029985694e−16 |
| 47 | NZ_AFBO01000685 | Klebsiella sp. MS 92-3 K_spMS92-3-1.0_Cont1649.3: | 6.05465029985694e−16 |
| | | NZ_AFBO01000685 | |
| 48 | CP002910 | Klebsiella pneumoniae KCTC 2242: CP002910 | 6.05465029985694e−16 |
| 49 | NC_013850 | Klebsiella variicola At-22 chromosome: NC_013850 | 6.05465029985694e−16 |
| 50 | NC_013850 | Klebsiella variicola At-22 chromosome: NC_013850 | 6.05465029985694e−16 |

TABLE 9b
Data for Klebsiella, particularly K. oxytoca (continued)

| No. | sign_phenos | sign_phenos_class | best_pheno | best_pheno_class |
|---|---|---|---|---|
| 1 | A/S; AUG; CP; CRM; LVX; P/T | fluoroquinolone; lactam | A/S | lactam |
| 2 | A/S; AUG; CP; CRM; LVX; P/T | fluoroquinolone; lactam | A/S | lactam |
| 3 | A/S; AUG; CRM; LVX; P/T | fluoroquinolone; lactam | A/S | lactam |
| 4 | A/S; AUG; CP; CRM; LVX; P/T | fluoroquinolone; lactam | A/S | lactam |
| 5 | A/S; CP; LVX | fluoroquinolone; lactam | A/S | lactam |
| 6 | A/S; AUG; CP; CRM; LVX; P/T | fluoroquinolone; lactam | A/S | lactam |
| 7 | A/S; AUG; CP; CRM; LVX | fluoroquinolone; lactam | A/S | lactam |
| 8 | A/S; AUG; CP; CRM; LVX | fluoroquinolone; lactam | A/S | lactam |
| 9 | A/S; CRM; LVX | fluoroquinolone; lactam | A/S | lactam |
| 10 | A/S; AUG; CP; LVX | fluoroquinolone; lactam | A/S | lactam |
| 11 | A/S; AUG; CP; CRM; LVX | fluoroquinolone; lactam | A/S | lactam |
| 12 | A/S; AUG; CP; CRM; LVX | fluoroquinolone; lactam | A/S | lactam |
| 13 | A/S; AUG; CP; CRM; LVX | fluoroquinolone; lactam | A/S | lactam |
| 14 | A/S; AUG; CP; CRM; LVX | fluoroquinolone; lactam | A/S | lactam |
| 15 | A/S; CP; LVX | fluoroquinolone; lactam | A/S | lactam |
| 16 | A/S; AUG; CP; CRM; LVX; P/T | fluoroquinolone; lactam | A/S | lactam |
| 17 | A/S; AUG; CP; CRM; LVX | fluoroquinolone; lactam | A/S | lactam |
| 18 | A/S; AUG; CP; CRM; LVX | fluoroquinolone; lactam | A/S | lactam |
| 19 | A/S; AUG; CP; CRM; LVX | fluoroquinolone; lactam | A/S | lactam |
| 20 | A/S; AUG; CP; CRM; LVX | fluoroquinolone; lactam | A/S | lactam |
| 21 | A/S; AUG; CP; CRM; LVX | fluoroquinolone; lactam | A/S | lactam |
| 22 | A/S; AUG; CP; CRM; LVX | fluoroquinolone; lactam | A/S | lactam |
| 23 | A/S; AUG; CP; CRM; LVX | fluoroquinolone; lactam | A/S | lactam |
| 24 | A/S; AUG; CP; CRM; LVX | fluoroquinolone; lactam | A/S | lactam |
| 25 | A/S; AUG; CP; CRM; LVX | fluoroquinolone; lactam | A/S | lactam |
| 26 | A/S; AUG; CP; CRM; LVX | fluoroquinolone; lactam | A/S | lactam |
| 27 | A/S; AUG; CP; CRM; LVX | fluoroquinolone; lactam | A/S | lactam |
| 28 | A/S; AUG; CP; CRM; LVX | fluoroquinolone; lactam | A/S | lactam |
| 29 | A/S; AUG; CP; CRM; LVX | fluoroquinolone; lactam | A/S | lactam |
| 30 | A/S; AUG; CP; CRM; LVX | fluoroquinolone; lactam | A/S | lactam |
| 31 | A/S; AUG; CP; CRM; LVX | fluoroquinolone; lactam | A/S | lactam |
| 32 | A/S; AUG; CP; CRM; LVX | fluoroquinolone; lactam | A/S | lactam |
| 33 | A/S; AUG; CP; CRM; LVX | fluoroquinolone; lactam | A/S | lactam |
| 34 | A/S; AUG; CP; CRM; LVX | fluoroquinolone; lactam | A/S | lactam |
| 35 | A/S; AUG; CP; CRM; LVX | fluoroquinolone; lactam | A/S | lactam |
| 36 | A/S; AUG; CP; CRM; LVX | fluoroquinolone; lactam | A/S | lactam |
| 37 | A/S; AUG; CP; CRM; LVX | fluoroquinolone; lactam | A/S | lactam |
| 38 | A/S; AUG; CP; CRM; LVX | fluoroquinolone; lactam | A/S | lactam |
| 39 | A/S; AUG; CP; CRM; LVX | fluoroquinolone; lactam | A/S | lactam |
| 40 | A/S; CRM; LVX | fluoroquinolone; lactam | A/S | lactam |
| 41 | A/S; AUG; CP; CRM; LVX | fluoroquinolone; lactam | A/S | lactam |
| 42 | A/S; AUG; CP; CRM; LVX | fluoroquinolone; lactam | A/S | lactam |
| 43 | A/S; AUG; CP; CRM; LVX | fluoroquinolone; lactam | A/S | lactam |
| 44 | A/S; CRM; LVX | fluoroquinolone; lactam | A/S | lactam |
| 45 | A/S; AUG; CP; CRM; LVX | fluoroquinolone; lactam | A/S | lactam |
| 46 | A/S; AUG; CP; CRM; LVX | fluoroquinolone; lactam | A/S | lactam |
| 47 | A/S; CP; LVX | fluoroquinolone; lactam | A/S | lactam |
| 48 | A/S; CRM; LVX | fluoroquinolone; lactam | A/S | lactam |
| 49 | A/S; AUG; CP; CRM; LVX | fluoroquinolone; lactam | A/S | lactam |
| 50 | A/S; CRM; LVX | fluoroquinolone; lactam | A/S | lactam |

TABLE 9c
Data for Klebsiella, particularly K. oxytoca (continued)

| No. | num_fluoroquinolone | num_lactam |
|---|---|---|
| 1 | 2 | 4 |
| 2 | 2 | 4 |
| 3 | 1 | 4 |
| 4 | 2 | 4 |
| 5 | 2 | 1 |
| 6 | 2 | 4 |
| 7 | 2 | 3 |
| 8 | 2 | 3 |
| 9 | 1 | 2 |
| 10 | 2 | 2 |
| 11 | 2 | 3 |
| 12 | 2 | 3 |
| 13 | 2 | 3 |
| 14 | 2 | 3 |
| 15 | 2 | 1 |
| 16 | 2 | 4 |
| 17 | 2 | 3 |
| 18 | 2 | 3 |
| 19 | 2 | 3 |
| 20 | 2 | 3 |
| 21 | 2 | 3 |
| 22 | 2 | 3 |
| 23 | 2 | 3 |
| 24 | 2 | 3 |
| 25 | 2 | 3 |
| 26 | 2 | 3 |
| 27 | 2 | 3 |
| 28 | 2 | 3 |
| 29 | 2 | 3 |
| 30 | 2 | 3 |
| 31 | 2 | 3 |
| 32 | 2 | 3 |
| 33 | 2 | 3 |
| 34 | 2 | 3 |
| 35 | 2 | 3 |
| 36 | 2 | 3 |
| 37 | 2 | 3 |
| 38 | 2 | 3 |
| 39 | 2 | 3 |
| 40 | 1 | 2 |
| 41 | 2 | 3 |
| 42 | 2 | 3 |
| 43 | 2 | 3 |
| 44 | 1 | 2 |
| 45 | 2 | 3 |
| 46 | 2 | 3 |
| 47 | 2 | 1 |
| 48 | 1 | 2 |
| 49 | 2 | 3 |
| 50 | 1 | 2 |

TABLE 9d
Data for Klebsiella, particularly K. oxytoca (continued)

| No. | A/S_pv_adj | AUG_pv_adj | AZT_pv_adj | CAX_pv_adj | CFT_pv_adj |
|---|---|---|---|---|---|
| 1 | 7.25E−19 | 1.72E−03 | 1.02E−01 | 7.63E−02 | 1.14E−01 |
| 2 | 7.25E−19 | 1.72E−03 | 1.02E−01 | 7.63E−02 | 1.14E−01 |
| 3 | 1.17E−17 | 2.11E−03 | 1.25E−02 | 1.67E−02 | 3.76E−02 |
| 4 | 9.82E−17 | 1.48E−03 | 1.97E−02 | 1.37E−02 | 6.22E−02 |
| 5 | 4.07E−16 | 1.01E−02 | 2.64E−02 | 3.46E−02 | 3.40E−02 |
| 6 | 4.07E−16 | 2.92E−04 | 3.51E−02 | 2.48E−02 | 4.69E−02 |
| 7 | 6.05E−16 | 7.34E−03 | 3.46E−02 | 2.50E−02 | 2.46E−02 |
| 8 | 6.05E−16 | 7.34E−03 | 3.46E−02 | 2.50E−02 | 2.46E−02 |
| 9 | 6.05E−16 | 1.93E−02 | 7.20E−02 | 7.25E−02 | 5.85E−02 |
| 10 | 6.05E−16 | 9.84E−03 | 4.51E−02 | 3.38E−02 | 2.50E−02 |
| 11 | 6.05E−16 | 7.34E−03 | 3.46E−02 | 2.50E−02 | 2.46E−02 |
| 12 | 6.05E−16 | 7.34E−03 | 3.46E−02 | 2.50E−02 | 2.46E−02 |
| 13 | 6.05E−16 | 7.34E−03 | 3.46E−02 | 2.50E−02 | 2.46E−02 |
| 14 | 6.05E−16 | 7.34E−03 | 3.46E−02 | 2.50E−02 | 2.46E−02 |
| 15 | 6.05E−16 | 1.01E−02 | 4.61E−02 | 3.45E−02 | 3.46E−02 |
| 16 | 6.05E−16 | 5.13E−03 | 2.58E−02 | 1.89E−02 | 1.75E−02 |
| 17 | 6.05E−16 | 7.34E−03 | 3.46E−02 | 2.50E−02 | 2.46E−02 |
| 18 | 6.05E−16 | 7.34E−03 | 3.46E−02 | 2.50E−02 | 2.46E−02 |
| 19 | 6.05E−16 | 7.34E−03 | 3.46E−02 | 2.50E−02 | 2.46E−02 |
| 20 | 6.05E−16 | 7.34E−03 | 3.46E−02 | 2.50E−02 | 2.46E−02 |
| 21 | 6.05E−16 | 7.34E−03 | 3.46E−02 | 2.50E−02 | 2.46E−02 |
| 22 | 6.05E−16 | 7.34E−03 | 3.46E−02 | 2.50E−02 | 2.46E−02 |
| 23 | 6.05E−16 | 7.34E−03 | 3.46E−02 | 2.50E−02 | 2.46E−02 |
| 24 | 6.05E−16 | 7.34E−03 | 3.46E−02 | 2.50E−02 | 2.46E−02 |
| 25 | 6.05E−16 | 5.42E−03 | 3.46E−02 | 1.98E−02 | 2.46E−02 |
| 26 | 6.05E−16 | 7.34E−03 | 3.46E−02 | 2.50E−02 | 2.46E−02 |
| 27 | 6.05E−16 | 7.34E−03 | 3.46E−02 | 2.50E−02 | 2.46E−02 |
| 28 | 6.05E−16 | 7.34E−03 | 3.46E−02 | 2.50E−02 | 2.46E−02 |
| 29 | 6.05E−16 | 7.34E−03 | 3.46E−02 | 2.50E−02 | 2.46E−02 |
| 30 | 6.05E−16 | 7.34E−03 | 3.46E−02 | 2.50E−02 | 2.46E−02 |
| 31 | 6.05E−16 | 7.34E−03 | 3.46E−02 | 2.50E−02 | 2.46E−02 |
| 32 | 6.05E−16 | 7.34E−03 | 3.46E−02 | 2.50E−02 | 2.46E−02 |
| 33 | 6.05E−16 | 7.34E−03 | 3.46E−02 | 2.50E−02 | 2.46E−02 |
| 34 | 6.05E−16 | 7.34E−03 | 3.46E−02 | 2.50E−02 | 2.46E−02 |
| 35 | 6.05E−16 | 7.34E−03 | 3.46E−02 | 2.50E−02 | 2.46E−02 |
| 36 | 6.05E−16 | 7.34E−03 | 3.46E−02 | 2.50E−02 | 2.46E−02 |
| 37 | 6.05E−16 | 7.34E−03 | 3.46E−02 | 2.50E−02 | 2.46E−02 |
| 38 | 6.05E−16 | 7.34E−03 | 3.46E−02 | 2.50E−02 | 2.46E−02 |
| 39 | 6.05E−16 | 7.34E−03 | 3.46E−02 | 2.50E−02 | 2.46E−02 |
| 40 | 6.05E−16 | 1.96E−02 | 7.24E−02 | 9.30E−02 | 5.85E−02 |
| 41 | 6.05E−16 | 7.42E−03 | 3.51E−02 | 2.53E−02 | 2.48E−02 |
| 42 | 6.05E−16 | 7.34E−03 | 3.46E−02 | 2.50E−02 | 2.46E−02 |
| 43 | 6.05E−16 | 7.42E−03 | 3.51E−02 | 2.53E−02 | 2.48E−02 |
| 44 | 6.05E−16 | 1.96E−02 | 7.24E−02 | 9.30E−02 | 5.85E−02 |
| 45 | 6.05E−16 | 7.34E−03 | 3.46E−02 | 2.50E−02 | 2.46E−02 |
| 46 | 6.05E−16 | 7.42E−03 | 3.51E−02 | 2.53E−02 | 2.48E−02 |
| 47 | 6.05E−16 | 1.84E−02 | 7.73E−02 | 5.74E−02 | 4.41E−02 |
| 48 | 6.05E−16 | 1.96E−02 | 7.24E−02 | 9.30E−02 | 5.85E−02 |
| 49 | 6.05E−16 | 7.34E−03 | 3.46E−02 | 2.50E−02 | 2.46E−02 |
| 50 | 6.05E−16 | 1.96E−02 | 7.24E−02 | 9.30E−02 | 5.85E−02 |

TABLE 9e
Data for Klebsiella, particularly K. oxytoca (continued)

| No. | CP_pv_adj | CRM_pv_adj | LVX_pv_adj | P/T_pv_adj |
|---|---|---|---|---|
| 1 | 4.47E−03 | 3.22E−03 | 3.33E−05 | 4.21E−03 |
| 2 | 4.47E−03 | 3.22E−03 | 3.33E−05 | 4.21E−03 |
| 3 | 4.19E−02 | 3.50E−03 | 2.38E−03 | 7.73E−03 |
| 4 | 2.12E−04 | 4.16E−03 | 5.03E−07 | 3.38E−03 |
| 5 | 2.11E−03 | 1.38E−02 | 6.28E−05 | 1.93E−02 |
| 6 | 6.71E−04 | 1.62E−03 | 8.24E−07 | 2.85E−03 |
| 7 | 1.30E−03 | 7.85E−03 | 5.53E−05 | 1.37E−02 |
| 8 | 1.30E−03 | 7.85E−03 | 5.53E−05 | 1.37E−02 |
| 9 | 6.62E−02 | 2.94E−03 | 1.50E−03 | 3.78E−02 |
| 10 | 1.98E−03 | 1.03E−02 | 5.68E−05 | 1.89E−02 |
| 11 | 1.30E−03 | 7.85E−03 | 5.53E−05 | 1.37E−02 |
| 12 | 1.30E−03 | 7.85E−03 | 5.53E−05 | 1.37E−02 |
| 13 | 1.30E−03 | 7.85E−03 | 5.53E−05 | 1.37E−02 |
| 14 | 1.30E−03 | 7.85E−03 | 5.53E−05 | 1.37E−02 |
| 15 | 1.26E−03 | 1.04E−02 | 3.08E−05 | 1.93E−02 |
| 16 | 7.58E−04 | 6.15E−03 | 5.93E−05 | 9.93E−03 |
| 17 | 1.30E−03 | 7.85E−03 | 5.53E−05 | 1.37E−02 |
| 18 | 1.30E−03 | 7.85E−03 | 5.53E−05 | 1.37E−02 |
| 19 | 1.30E−03 | 7.85E−03 | 5.53E−05 | 1.37E−02 |
| 20 | 1.30E−03 | 7.85E−03 | 5.53E−05 | 1.37E−02 |
| 21 | 1.30E−03 | 7.85E−03 | 5.53E−05 | 1.37E−02 |
| 22 | 1.30E−03 | 7.85E−03 | 5.53E−05 | 1.37E−02 |
| 23 | 1.30E−03 | 7.85E−03 | 5.53E−05 | 1.37E−02 |
| 24 | 1.30E−03 | 7.85E−03 | 5.53E−05 | 1.37E−02 |
| 25 | 3.39E−03 | 6.15E−03 | 1.55E−04 | 1.03E−02 |
| 26 | 1.30E−03 | 7.85E−03 | 5.53E−05 | 1.37E−02 |
| 27 | 1.30E−03 | 7.85E−03 | 5.53E−05 | 1.37E−02 |
| 28 | 1.30E−03 | 7.85E−03 | 5.53E−05 | 1.37E−02 |
| 29 | 1.30E−03 | 7.85E−03 | 5.53E−05 | 1.37E−02 |
| 30 | 1.30E−03 | 7.85E−03 | 5.53E−05 | 1.37E−02 |
| 31 | 1.30E−03 | 7.85E−03 | 5.53E−05 | 1.37E−02 |
| 32 | 1.30E−03 | 7.85E−03 | 5.53E−05 | 1.37E−02 |
| 33 | 1.30E−03 | 7.85E−03 | 5.53E−05 | 1.37E−02 |
| 34 | 1.30E−03 | 7.85E−03 | 5.53E−05 | 1.37E−02 |
| 35 | 1.30E−03 | 7.85E−03 | 5.53E−05 | 1.37E−02 |
| 36 | 1.30E−03 | 7.85E−03 | 5.53E−05 | 1.37E−02 |
| 37 | 1.30E−03 | 7.85E−03 | 5.53E−05 | 1.37E−02 |
| 38 | 1.30E−03 | 7.85E−03 | 5.53E−05 | 1.37E−02 |
| 39 | 1.30E−03 | 7.85E−03 | 5.53E−05 | 1.37E−02 |
| 40 | 9.00E−02 | 4.08E−03 | 1.50E−03 | 4.97E−02 |
| 41 | 1.97E−03 | 7.93E−03 | 5.53E−05 | 1.39E−02 |
| 42 | 1.30E−03 | 7.85E−03 | 5.53E−05 | 1.37E−02 |
| 43 | 1.97E−03 | 7.93E−03 | 5.53E−05 | 1.39E−02 |
| 44 | 9.00E−02 | 4.08E−03 | 1.50E−03 | 4.97E−02 |
| 45 | 1.30E−03 | 7.85E−03 | 5.53E−05 | 1.37E−02 |
| 46 | 1.97E−03 | 7.93E−03 | 5.53E−05 | 1.39E−02 |
| 47 | 7.43E−03 | 1.01E−02 | 2.47E−04 | 3.31E−02 |
| 48 | 9.00E−02 | 4.08E−03 | 1.50E−03 | 4.97E−02 |
| 49 | 1.30E−03 | 7.85E−03 | 5.53E−05 | 1.37E−02 |
| 50 | 9.00E−02 | 4.08E−03 | 1.50E−03 | 4.97E−02 |

TABLE 9f
Data for Klebsiella, particularly K. oxytoca (continued)

| No. | Locus.Tag | Gene.Symbol | GenBank.Accession | Chromosome |
|---|---|---|---|---|
| 1 | KPK_2590 | | YP_002238421 | |
| 2 | HMPREF0485_01216 | | ZP_06548816 | |
| 3 | KPK_0292 | | YP_002236174 | |
| 4 | EAE_11985 | | YP_004592590 | |
| 5 | Kvar_2784 | | YP_003439702 | |
| 6 | HMPREF0484_4675 | add | ZP_06017656 | |
| 7 | Kvar_2381 | | YP_003439305 | |
| 8 | KPN2242_04295 | | AEJ96779 | |
| 9 | KPN2242_08680 | | AEJ97652 | |
| 10 | HMPREF0485_01916 | | ZP_06549516 | |
| 11 | HMPREF0485_01247 | | ZP_06548847 | |
| 12 | KPK_2622 | | YP_002238453 | |
| 13 | Kvar_2568 | | YP_003439490 | |
| 14 | Kvar_0816 | | YP_003437758 | |
| 15 | Kvar_4643 | | YP_003441547 | |
| 16 | Kvar_3771 | | YP_003440683 | |
| 17 | Kvar_1596 | | YP_003438533 | |
| 18 | HMPREF0485_03998 | | ZP_06551594 | |
| 19 | Kvar_2140 | | YP_003439069 | |
| 20 | Kvar_3380 | | YP_003440292 | |
| 21 | HMPREF0485_00446 | | ZP_06548046 | |
| 22 | KPN_00275 | | YP_001333958 | |
| 23 | Kvar_1589 | | YP_003438526 | |
| 24 | Kvar_1856 | | YP_003438789 | |
| 25 | KP1_3016 | | YP_002919724 | |
| 26 | Kvar_5099 | | YP_003442002 | |
| 27 | Kvar_0479 | | YP_003437421 | |
| 28 | HMPREF0485_00450 | | ZP_06548050 | |
| 29 | Kvar_1586 | | YP_003438523 | |
| 30 | Kvar_1598 | | YP_003438535 | |
| 31 | Kvar_1597 | | YP_003438534 | |
| 32 | HMPREF0485_00443 | | ZP_06548043 | |
| 33 | HMPREF0485_00453 | | ZP_06548053 | |
| 34 | KP1_2851 | | YP_002919569 | |
| 35 | KPN2242_01120 | | AEJ96149 | |
| 36 | KPK_2936 | | YP_002238762 | |
| 37 | HMPREF9538_03901 | | ZP_08306208 | |
| 38 | HMPREF0485_02477 | | ZP_06550077 | |
| 39 | HMPREF0485_01831 | | ZP_06549431 | |
| 40 | Kvar_3258 | | YP_003440171 | |
| 41 | Kvar_3395 | | YP_003440307 | |
| 42 | Kvar_3210 | | YP_003440127 | |
| 43 | KPN_00277 | | YP_001333960 | |
| 44 | HMPREF0485_02605 | | ZP_06550204 | |
| 45 | Kvar_1604 | | YP_003438541 | |
| 46 | Kvar_4545 | | YP_003441451 | |
| 47 | HMPREF9538_05113 | | ZP_08307402 | |
| 48 | KPN2242_08695 | | AEJ97655 | |
| 49 | Kvar_4742 | | YP_003441646 | |
| 50 | Kvar_3261 | | YP_003440174 | |

TABLE 9g
Data for Klebsiella, particularly K. oxytoca (continued)

| No. | Start.Coord | End.Coord | Strand | Scaffold.ID |
|---|---|---|---|---|
| 1 | 2648871 | 2649476 | + | 643348533 |
| 2 | 1355295 | 1356167 | − | 647536389 |
| 3 | 321413 | 321955 | − | 643348533 |
| 4 | 2576463 | 2577677 | − | 650716122 |
| 5 | 2889784 | 2890686 | − | 646312028 |
| 6 | 12390 | 13076 | + | 647009977 |
| 7 | 2489613 | 2491040 | + | 646312028 |
| 8 | 925860 | 926771 | − | 651053122 |
| 9 | 1837699 | 1838718 | + | 651053122 |
| 10 | 237063 | 237326 | + | 647536390 |
| 11 | 1387256 | 1388314 | + | 647536389 |
| 12 | 2680912 | 2681727 | + | 643348533 |
| 13 | 2679911 | 2680687 | + | 646312028 |
| 14 | 851698 | 852411 | + | 646312028 |
| 15 | 4934923 | 4936932 | + | 646312028 |
| 16 | 3964905 | 3966425 | + | 646312028 |
| 17 | 1721712 | 1722182 | − | 646312028 |
| 18 | 140912 | 141796 | + | 647536393 |
| 19 | 2255010 | 2255996 | + | 646312028 |
| 20 | 3519306 | 3520322 | − | 646312028 |
| 21 | 523538 | 524377 | − | 647536389 |
| 22 | 311624 | 312142 | + | 640753018 |
| 23 | 1716249 | 1716779 | + | 646312028 |
| 24 | 1971206 | 1973212 | − | 646312028 |
| 25 | 2878963 | 2879583 | + | 646564530 |
| 26 | 5455245 | 5456423 | − | 646312028 |
| 27 | 509672 | 510736 | + | 646312028 |
| 28 | 528513 | 529175 | − | 647536389 |
| 29 | 1711303 | 1712709 | − | 646312028 |
| 30 | 1723564 | 1724937 | − | 646312028 |
| 31 | 1722169 | 1723554 | − | 646312028 |
| 32 | 520902 | 521159 | − | 647536389 |
| 33 | 531062 | 532510 | − | 647536389 |
| 34 | 2717504 | 2718439 | + | 646564530 |
| 35 | 230663 | 231895 | − | 651053122 |
| 36 | 2983904 | 2984626 | + | 643348533 |
| 37 | 15395 | 16450 | + | 651333420 |
| 38 | 872347 | 873972 | + | 647536390 |
| 39 | 149922 | 150884 | − | 647536390 |
| 40 | 3387706 | 3389424 | − | 646312028 |
| 41 | 3535340 | 3535786 | + | 646312028 |
| 42 | 3340882 | 3341376 | − | 646312028 |
| 43 | 312969 | 315452 | + | 640753018 |
| 44 | 1009891 | 1010898 | + | 647536390 |
| 45 | 1730820 | 1734335 | + | 646312028 |
| 46 | 4822901 | 4823620 | + | 646312028 |
| 47 | 52 | 390 | − | 651333602 |
| 48 | 1839612 | 1840562 | + | 651053122 |
| 49 | 5039066 | 5040004 | + | 646312028 |
| 50 | 3391540 | 3392502 | + | 646312028 |

TABLE 10a
Data for Klebsiella, particularly K. oxytoca

| | Scaffold.External. | | |
|---|---|---|---|
| No. | Accession | Scaffold.Name | best_pv |
| 1 | NC_011283 | Klebsiella pneumoniae 342: NC_011283 | 7.24545119859105e−19 |
| 2 | NZ_GG745508 | Klebsiella sp. 1_1_55 genomic scaffold supercont1.1: NZ_GG745508 | 7.24545119859105e−19 |
| 3 | NC_015663 | Enterobacter aerogenes KCTC 2190 chromosome: NC_015663 | 9.82145388713083e−17 |
| 4 | NC_013850 | Klebsiella variicola At-22 chromosome: NC_013850 | 4.06768464186916e−16 |
| 5 | NZ_ACZD01000230 | Klebsiella pneumoniae subsp. rhinoscleromatis ATCC 13884 | 4.06768464186916e−16 |
| | | contig00265: NZ_ACZD01000230 | |
| 6 | NC_013850 | Klebsiella variicola At-22 chromosome: NC_013850 | 6.05465029985694e−16 |
| 7 | CP002910 | Klebsiella pneumoniae KCTC 2242: CP002910 | 6.05465029985694e−16 |
| 8 | NZ_GG745509 | Klebsiella sp. 1_1_55 genomic scaffold supercont1.2: NZ_GG745509 | 6.05465029985694e−16 |
| 9 | NZ_GG745508 | Klebsiella sp. 1_1_55 genomic scaffold supercont1.1: NZ_GG745508 | 6.05465029985694e−16 |
| 10 | NC_011283 | Klebsiella pneumoniae 342: NC_011283 | 6.05465029985694e−16 |
| 11 | NC_013850 | Klebsiella variicola At-22 chromosome: NC_013850 | 6.05465029985694e−16 |
| 12 | NC_013850 | Klebsiella variicola At-22 chromosome: NC_013850 | 6.05465029985694e−16 |
| 13 | NC_013850 | Klebsiella variicola At-22 chromosome: NC_013850 | 6.05465029985694e−16 |
| 14 | NC_013850 | Klebsiella variicola At-22 chromosome: NC_013850 | 6.05465029985694e−16 |
| 15 | NC_013850 | Klebsiella variicola At-22 chromosome: NC_013850 | 6.05465029985694e−16 |
| 16 | NZ_GG745512 | Klebsiella sp. 1_1_55 genomic scaffold supercont1.5: NZ_GG745512 | 6.05465029985694e−16 |
| 17 | NC_013850 | Klebsiella variicola At-22 chromosome: NC_013850 | 6.05465029985694e−16 |
| 18 | NC_013850 | Klebsiella variicola At-22 chromosome: NC_013850 | 6.05465029985694e−16 |
| 19 | NZ_GG745508 | Klebsiella sp. 1_1_55 genomic scaffold supercont1.1: NZ_GG745508 | 6.05465029985694e−16 |
| 20 | NC_009648 | Klebsiella pneumoniae subsp. pneumoniae MGH 78578: NC_009648 | 6.05465029985694e−16 |
| 21 | NC_013850 | Klebsiella variicola At-22 chromosome: NC_013850 | 6.05465029985694e−16 |
| 22 | NC_013850 | Klebsiella variicola At-22 chromosome: NC_013850 | 6.05465029985694e−16 |
| 23 | NC_012731 | Klebsiella pneumoniae NTUH-K2044: NC_012731 | 6.05465029985694e−16 |
| 24 | NC_013850 | Klebsiella variicola At-22 chromosome: NC_013850 | 6.05465029985694e−16 |
| 25 | NC_013850 | Klebsiella variicola At-22 chromosome: NC_013850 | 6.05465029985694e−16 |
| 26 | NZ_GG745508 | Klebsiella sp. 1_1_55 genomic scaffold supercont1.1: NZ_GG745508 | 6.05465029985694e−16 |
| 27 | NC_013850 | Klebsiella variicola At-22 chromosome: NC_013850 | 6.05465029985694e−16 |
| 28 | NC_013850 | Klebsiella variicola At-22 chromosome: NC_013850 | 6.05465029985694e−16 |
| 29 | NC_013850 | Klebsiella variicola At-22 chromosome: NC_013850 | 6.05465029985694e−16 |
| 30 | NZ_GG745508 | Klebsiella sp. 1_1_55 genomic scaffold supercont1.1: NZ_GG745508 | 6.05465029985694e−16 |
| 31 | NZ_GG745508 | Klebsiella sp. 1_1_55 genomic scaffold supercont1.1: NZ_GG745508 | 6.05465029985694e−16 |
| 32 | NC_012731 | Klebsiella pneumoniae NTUH-K2044: NC_012731 | 6.05465029985694e−16 |
| 33 | CP002910 | Klebsiella pneumoniae KCTC 2242: CP002910 | 6.05465029985694e−16 |
| 34 | NC_011283 | Klebsiella pneumoniae 342: NC_011283 | 6.05465029985694e−16 |
| 35 | NZ_AFBO01000503 | Klebsiella sp. MS 92-3 K_spMS92-3-1.0_Cont988.13: | 6.05465029985694e−16 |
| | | NZ_AFBO01000503 | |
| 36 | NZ_GG745509 | Klebsiella sp. 1_1_55 genomic scaffold supercont1.2: NZ_GG745509 | 6.05465029985694e−16 |
| 37 | NZ_GG745509 | Klebsiella sp. 1_1_55 genomic scaffold supercont1.2: NZ_GG745509 | 6.05465029985694e−16 |
| 38 | NC_013850 | Klebsiella variicola At-22 chromosome: NC_013850 | 6.05465029985694e−16 |
| 39 | NC_013850 | Klebsiella variicola At-22 chromosome: NC_013850 | 6.05465029985694e−16 |
| 40 | NC_009648 | Klebsiella pneumoniae subsp. pneumoniae MGH 78578: NC_009648 | 6.05465029985694e−16 |
| 41 | NC_013850 | Klebsiella variicola At-22 chromosome: NC_013850 | 6.05465029985694e−16 |
| 42 | NC_013850 | Klebsiella variicola At-22 chromosome: NC_013850 | 6.05465029985694e−16 |
| 43 | NZ_AFBO01000685 | Klebsiella sp. MS 92-3 K_spMS92-3-1.0_Cont1649.3: | 6.05465029985694e−16 |
| | | NZ_AFBO01000685 | |
| 44 | NC_013850 | Klebsiella variicola At-22 chromosome: NC_013850 | 6.05465029985694e−16 |
| 45 | NC_013850 | Klebsiella variicola At-22 chromosome: NC_013850 | 6.05465029985694e−16 |
| 46 | NC_013850 | Klebsiella variicola At-22 chromosome: NC_013850 | 6.05465029985694e−16 |
| 47 | NC_009648 | Klebsiella pneumoniae subsp. pneumoniae MGH 78578: NC_009648 | 6.05465029985694e−16 |
| 48 | NC_011283 | Klebsiella pneumoniae 342: NC_011283 | 6.05465029985694e−16 |
| 49 | NC_014500 | Dickeya dadantii 3937 chromosome: NC_014500 | 6.05465029985694e−16 |
| 50 | NC_011283 | Klebsiella pneumoniae 342: NC_011283 | 6.05465029985694e−16 |

TABLE 10b
Data for Klebsiella, particularly K. oxytoca (continued)

| No. | sign_phenos | sign_phenos_class | best_pheno | best_pheno_class |
|---|---|---|---|---|
| 1 | A/S; AUG; CP; CRM; LVX; P/T | fluoroquinolone; lactam | A/S | lactam |
| 2 | A/S; AUG; CP; CRM; LVX; P/T | fluoroquinolone; lactam | A/S | lactam |
| 3 | A/S; AUG; CP; CRM; LVX; P/T | fluoroquinolone; lactam | A/S | lactam |
| 4 | A/S; CP; LVX | fluoroquinolone; lactam | A/S | lactam |
| 5 | A/S; AUG; CP; CRM; LVX; P/T | fluoroquinolone; lactam | A/S | lactam |
| 6 | A/S; AUG; CP; CRM; LVX | fluoroquinolone; lactam | A/S | lactam |
| 7 | A/S; AUG; CP; CRM; LVX | fluoroquinolone; lactam | A/S | lactam |
| 8 | A/S; AUG; CP; LVX | fluoroquinolone; lactam | A/S | lactam |
| 9 | A/S; AUG; CP; CRM; LVX | fluoroquinolone; lactam | A/S | lactam |
| 10 | A/S; AUG; CP; CRM; LVX | fluoroquinolone; lactam | A/S | lactam |
| 11 | A/S; AUG; CP; CRM; LVX | fluoroquinolone; lactam | A/S | lactam |
| 12 | A/S; AUG; CP; CRM; LVX | fluoroquinolone; lactam | A/S | lactam |
| 13 | A/S; CP; LVX | fluoroquinolone; lactam | A/S | lactam |
| 14 | A/S; AUG; CP; CRM; LVX; P/T | fluoroquinolone; lactam | A/S | lactam |
| 15 | A/S; AUG; CP; CRM; LVX | fluoroquinolone; lactam | A/S | lactam |
| 16 | A/S; AUG; CP; CRM; LVX | fluoroquinolone; lactam | A/S | lactam |
| 17 | A/S; AUG; CP; CRM; LVX | fluoroquinolone; lactam | A/S | lactam |
| 18 | A/S; AUG; CP; CRM; LVX | fluoroquinolone; lactam | A/S | lactam |
| 19 | A/S; AUG; CP; CRM; LVX | fluoroquinolone; lactam | A/S | lactam |
| 20 | A/S; AUG; CP; CRM; LVX | fluoroquinolone; lactam | A/S | lactam |
| 21 | A/S; AUG; CP; CRM; LVX | fluoroquinolone; lactam | A/S | lactam |
| 22 | A/S; AUG; CP; CRM; LVX | fluoroquinolone; lactam | A/S | lactam |
| 23 | A/S; AUG; CP; CRM; LVX | fluoroquinolone; lactam | A/S | lactam |
| 24 | A/S; AUG; CP; CRM; LVX | fluoroquinolone; lactam | A/S | lactam |
| 25 | A/S; AUG; CP; CRM; LVX | fluoroquinolone; lactam | A/S | lactam |
| 26 | A/S; AUG; CP; CRM; LVX | fluoroquinolone; lactam | A/S | lactam |
| 27 | A/S; AUG; CP; CRM; LVX | fluoroquinolone; lactam | A/S | lactam |
| 28 | A/S; AUG; CP; CRM; LVX | fluoroquinolone; lactam | A/S | lactam |
| 29 | A/S; AUG; CP; CRM; LVX | fluoroquinolone; lactam | A/S | lactam |
| 30 | A/S; AUG; CP; CRM; LVX | fluoroquinolone; lactam | A/S | lactam |
| 31 | A/S; AUG; CP; CRM; LVX | fluoroquinolone; lactam | A/S | lactam |
| 32 | A/S; AUG; CP; CRM; LVX | fluoroquinolone; lactam | A/S | lactam |
| 33 | A/S; AUG; CP; CRM; LVX | fluoroquinolone; lactam | A/S | lactam |
| 34 | A/S; AUG; CP; CRM; LVX | fluoroquinolone; lactam | A/S | lactam |
| 35 | A/S; AUG; CP; CRM; LVX | fluoroquinolone; lactam | A/S | lactam |
| 36 | A/S; AUG; CP; CRM; LVX | fluoroquinolone; lactam | A/S | lactam |
| 37 | A/S; AUG; CP; CRM; LVX | fluoroquinolone; lactam | A/S | lactam |
| 38 | A/S; AUG; CP; CRM; LVX | fluoroquinolone; lactam | A/S | lactam |
| 39 | A/S; AUG; CP; CRM; LVX | fluoroquinolone; lactam | A/S | lactam |
| 40 | A/S; AUG; CP; CRM; LVX | fluoroquinolone; lactam | A/S | lactam |
| 41 | A/S; AUG; CP; CRM; LVX | fluoroquinolone; lactam | A/S | lactam |
| 42 | A/S; AUG; CP; CRM; LVX | fluoroquinolone; lactam | A/S | lactam |
| 43 | A/S; CP; LVX | fluoroquinolone; lactam | A/S | lactam |
| 44 | A/S; AUG; CP; CRM; LVX | fluoroquinolone; lactam | A/S | lactam |
| 45 | A/S; AUG; CP; CRM; LVX | fluoroquinolone; lactam | A/S | lactam |
| 46 | A/S; AUG; CP; CRM; LVX | fluoroquinolone; lactam | A/S | lactam |
| 47 | A/S; AUG; CP; CRM; LVX | fluoroquinolone; lactam | A/S | lactam |
| 48 | A/S; AUG; CP; CRM; LVX | fluoroquinolone; lactam | A/S | lactam |
| 49 | A/S; AUG; CP; CRM; LVX | fluoroquinolone; lactam | A/S | lactam |
| 50 | A/S; AUG; CP; CRM; LVX | fluoroquinolone; lactam | A/S | lactam |

TABLE 10c
Data for Klebsiella, particularly K. oxytoca (continued)

| No. | num_fluoroquinolone | num_lactam |
|---|---|---|
| 1 | 2 | 4 |
| 2 | 2 | 4 |
| 3 | 2 | 4 |
| 4 | 2 | 1 |
| 5 | 2 | 4 |
| 6 | 2 | 3 |
| 7 | 2 | 3 |
| 8 | 2 | 2 |
| 9 | 2 | 3 |
| 10 | 2 | 3 |
| 11 | 2 | 3 |
| 12 | 2 | 3 |
| 13 | 2 | 1 |
| 14 | 2 | 4 |
| 15 | 2 | 3 |
| 16 | 2 | 3 |
| 17 | 2 | 3 |
| 18 | 2 | 3 |
| 19 | 2 | 3 |
| 20 | 2 | 3 |
| 21 | 2 | 3 |
| 22 | 2 | 3 |
| 23 | 2 | 3 |
| 24 | 2 | 3 |
| 25 | 2 | 3 |
| 26 | 2 | 3 |
| 27 | 2 | 3 |
| 28 | 2 | 3 |
| 29 | 2 | 3 |
| 30 | 2 | 3 |
| 31 | 2 | 3 |
| 32 | 2 | 3 |
| 33 | 2 | 3 |
| 34 | 2 | 3 |
| 35 | 2 | 3 |
| 36 | 2 | 3 |
| 37 | 2 | 3 |
| 38 | 2 | 3 |
| 39 | 2 | 3 |
| 40 | 2 | 3 |
| 41 | 2 | 3 |
| 42 | 2 | 3 |
| 43 | 2 | 1 |
| 44 | 2 | 3 |
| 45 | 2 | 3 |
| 46 | 2 | 3 |
| 47 | 2 | 3 |
| 48 | 2 | 3 |
| 49 | 2 | 3 |
| 50 | 2 | 3 |

TABLE 10d
Data for Klebsiella, particularly K. oxytoca (continued)

| No. | A/S_pv_adj | AUG_pv_adj | AZT_pv_adj | CAX_pv_adj | CFT_pv_adj |
|---|---|---|---|---|---|
| 1 | 7.25E−19 | 1.72E−03 | 1.02E−01 | 7.63E−02 | 1.14E−01 |
| 2 | 7.25E−19 | 1.72E−03 | 1.02E−01 | 7.63E−02 | 1.14E−01 |
| 3 | 9.82E−17 | 1.48E−03 | 1.97E−02 | 1.37E−02 | 6.22E−02 |
| 4 | 4.07E−16 | 1.01E−02 | 2.64E−02 | 3.46E−02 | 3.40E−02 |
| 5 | 4.07E−16 | 2.92E−04 | 3.51E−02 | 2.48E−02 | 4.69E−02 |
| 6 | 6.05E−16 | 7.34E−03 | 3.46E−02 | 2.50E−02 | 2.46E−02 |
| 7 | 6.05E−16 | 7.34E−03 | 3.46E−02 | 2.50E−02 | 2.46E−02 |
| 8 | 6.05E−16 | 9.84E−03 | 4.51E−02 | 3.38E−02 | 2.50E−02 |
| 9 | 6.05E−16 | 7.34E−03 | 3.46E−02 | 2.50E−02 | 2.46E−02 |
| 10 | 6.05E−16 | 7.34E−03 | 3.46E−02 | 2.50E−02 | 2.46E−02 |
| 11 | 6.05E−16 | 7.34E−03 | 3.46E−02 | 2.50E−02 | 2.46E−02 |
| 12 | 6.05E−16 | 7.34E−03 | 3.46E−02 | 2.50E−02 | 2.46E−02 |
| 13 | 6.05E−16 | 1.01E−02 | 4.61E−02 | 3.45E−02 | 3.46E−02 |
| 14 | 6.05E−16 | 5.13E−03 | 2.58E−02 | 1.89E−02 | 1.75E−02 |
| 15 | 6.05E−16 | 7.34E−03 | 3.46E−02 | 2.50E−02 | 2.46E−02 |
| 16 | 6.05E−16 | 7.34E−03 | 3.46E−02 | 2.50E−02 | 2.46E−02 |
| 17 | 6.05E−16 | 7.34E−03 | 3.46E−02 | 2.50E−02 | 2.46E−02 |
| 18 | 6.05E−16 | 7.34E−03 | 3.46E−02 | 2.50E−02 | 2.46E−02 |
| 19 | 6.05E−16 | 7.34E−03 | 3.46E−02 | 2.50E−02 | 2.46E−02 |
| 20 | 6.05E−16 | 7.34E−03 | 3.46E−02 | 2.50E−02 | 2.46E−02 |
| 21 | 6.05E−16 | 7.34E−03 | 3.46E−02 | 2.50E−02 | 2.46E−02 |
| 22 | 6.05E−16 | 7.34E−03 | 3.46E−02 | 2.50E−02 | 2.46E−02 |
| 23 | 6.05E−16 | 5.42E−03 | 3.46E−02 | 1.98E−02 | 2.46E−02 |
| 24 | 6.05E−16 | 7.34E−03 | 3.46E−02 | 2.50E−02 | 2.46E−02 |
| 25 | 6.05E−16 | 7.34E−03 | 3.46E−02 | 2.50E−02 | 2.46E−02 |
| 26 | 6.05E−16 | 7.34E−03 | 3.46E−02 | 2.50E−02 | 2.46E−02 |
| 27 | 6.05E−16 | 7.34E−03 | 3.46E−02 | 2.50E−02 | 2.46E−02 |
| 28 | 6.05E−16 | 7.34E−03 | 3.46E−02 | 2.50E−02 | 2.46E−02 |
| 29 | 6.05E−16 | 7.34E−03 | 3.46E−02 | 2.50E−02 | 2.46E−02 |
| 30 | 6.05E−16 | 7.34E−03 | 3.46E−02 | 2.50E−02 | 2.46E−02 |
| 31 | 6.05E−16 | 7.34E−03 | 3.46E−02 | 2.50E−02 | 2.46E−02 |
| 32 | 6.05E−16 | 7.34E−03 | 3.46E−02 | 2.50E−02 | 2.46E−02 |
| 33 | 6.05E−16 | 7.34E−03 | 3.46E−02 | 2.50E−02 | 2.46E−02 |
| 34 | 6.05E−16 | 7.34E−03 | 3.46E−02 | 2.50E−02 | 2.46E−02 |
| 35 | 6.05E−16 | 7.34E−03 | 3.46E−02 | 2.50E−02 | 2.46E−02 |
| 36 | 6.05E−16 | 7.34E−03 | 3.46E−02 | 2.50E−02 | 2.46E−02 |
| 37 | 6.05E−16 | 7.34E−03 | 3.46E−02 | 2.50E−02 | 2.46E−02 |
| 38 | 6.05E−16 | 7.42E−03 | 3.51E−02 | 2.53E−02 | 2.48E−02 |
| 39 | 6.05E−16 | 7.34E−03 | 3.46E−02 | 2.50E−02 | 2.46E−02 |
| 40 | 6.05E−16 | 7.42E−03 | 3.51E−02 | 2.53E−02 | 2.48E−02 |
| 41 | 6.05E−16 | 7.34E−03 | 3.46E−02 | 2.50E−02 | 2.46E−02 |
| 42 | 6.05E−16 | 7.42E−03 | 3.51E−02 | 2.53E−02 | 2.48E−02 |
| 43 | 6.05E−16 | 1.84E−02 | 7.73E−02 | 5.74E−02 | 4.41E−02 |
| 44 | 6.05E−16 | 7.34E−03 | 3.46E−02 | 2.50E−02 | 2.46E−02 |
| 45 | 6.05E−16 | 7.34E−03 | 3.46E−02 | 2.50E−02 | 2.46E−02 |
| 46 | 6.05E−16 | 7.34E−03 | 3.46E−02 | 2.50E−02 | 2.46E−02 |
| 47 | 6.05E−16 | 7.34E−03 | 3.46E−02 | 2.50E−02 | 2.46E−02 |
| 48 | 6.05E−16 | 7.42E−03 | 3.51E−02 | 2.53E−02 | 2.48E−02 |
| 49 | 6.05E−16 | 7.34E−03 | 3.46E−02 | 2.50E−02 | 2.46E−02 |
| 50 | 6.05E−16 | 7.34E−03 | 3.46E−02 | 2.50E−02 | 2.46E−02 |

TABLE 10e
Data for Klebsiella, particularly K. oxytoca (continued)

| No. | CP_pv_adj | CRM_pv_adj | LVX_pv_adj | P/T_pv_adj |
|---|---|---|---|---|
| 1 | 4.47E−03 | 3.22E−03 | 3.33E−05 | 4.21E−03 |
| 2 | 4.47E−03 | 3.22E−03 | 3.33E−05 | 4.21E−03 |
| 3 | 2.12E−04 | 4.16E−03 | 5.03E−07 | 3.38E−03 |
| 4 | 2.11E−03 | 1.38E−02 | 6.28E−05 | 1.93E−02 |
| 5 | 6.71E−04 | 1.62E−03 | 8.24E−07 | 2.85E−03 |
| 6 | 1.30E−03 | 7.85E−03 | 5.53E−05 | 1.37E−02 |
| 7 | 1.30E−03 | 7.85E−03 | 5.53E−05 | 1.37E−02 |
| 8 | 1.98E−03 | 1.03E−02 | 5.68E−05 | 1.89E−02 |
| 9 | 1.30E−03 | 7.85E−03 | 5.53E−05 | 1.37E−02 |
| 10 | 1.30E−03 | 7.85E−03 | 5.53E−05 | 1.37E−02 |
| 11 | 1.30E−03 | 7.85E−03 | 5.53E−05 | 1.37E−02 |
| 12 | 1.30E−03 | 7.85E−03 | 5.53E−05 | 1.37E−02 |
| 13 | 1.26E−03 | 1.04E−02 | 3.08E−05 | 1.93E−02 |
| 14 | 7.58E−04 | 6.15E−03 | 5.93E−05 | 9.93E−03 |
| 15 | 1.30E−03 | 7.85E−03 | 5.53E−05 | 1.37E−02 |
| 16 | 1.30E−03 | 7.85E−03 | 5.53E−05 | 1.37E−02 |
| 17 | 1.30E−03 | 7.85E−03 | 5.53E−05 | 1.37E−02 |
| 18 | 1.30E−03 | 7.85E−03 | 5.53E−05 | 1.37E−02 |
| 19 | 1.30E−03 | 7.85E−03 | 5.53E−05 | 1.37E−02 |
| 20 | 1.30E−03 | 7.85E−03 | 5.53E−05 | 1.37E−02 |
| 21 | 1.30E−03 | 7.85E−03 | 5.53E−05 | 1.37E−02 |
| 22 | 1.30E−03 | 7.85E−03 | 5.53E−05 | 1.37E−02 |
| 23 | 3.39E−03 | 6.15E−03 | 1.55E−04 | 1.03E−02 |
| 24 | 1.30E−03 | 7.85E−03 | 5.53E−05 | 1.37E−02 |
| 25 | 1.30E−03 | 7.85E−03 | 5.53E−05 | 1.37E−02 |
| 26 | 1.30E−03 | 7.85E−03 | 5.53E−05 | 1.37E−02 |
| 27 | 1.30E−03 | 7.85E−03 | 5.53E−05 | 1.37E−02 |
| 28 | 1.30E−03 | 7.85E−03 | 5.53E−05 | 1.37E−02 |
| 29 | 1.30E−03 | 7.85E−03 | 5.53E−05 | 1.37E−02 |
| 30 | 1.30E−03 | 7.85E−03 | 5.53E−05 | 1.37E−02 |
| 31 | 1.30E−03 | 7.85E−03 | 5.53E−05 | 1.37E−02 |
| 32 | 1.30E−03 | 7.85E−03 | 5.53E−05 | 1.37E−02 |
| 33 | 1.30E−03 | 7.85E−03 | 5.53E−05 | 1.37E−02 |
| 34 | 1.30E−03 | 7.85E−03 | 5.53E−05 | 1.37E−02 |
| 35 | 1.30E−03 | 7.85E−03 | 5.53E−05 | 1.37E−02 |
| 36 | 1.30E−03 | 7.85E−03 | 5.53E−05 | 1.37E−02 |
| 37 | 1.30E−03 | 7.85E−03 | 5.53E−05 | 1.37E−02 |
| 38 | 1.97E−03 | 7.93E−03 | 5.53E−05 | 1.39E−02 |
| 39 | 1.30E−03 | 7.85E−03 | 5.53E−05 | 1.37E−02 |
| 40 | 1.97E−03 | 7.93E−03 | 5.53E−05 | 1.39E−02 |
| 41 | 1.30E−03 | 7.85E−03 | 5.53E−05 | 1.37E−02 |
| 42 | 1.97E−03 | 7.93E−03 | 5.53E−05 | 1.39E−02 |
| 43 | 7.43E−03 | 1.01E−02 | 2.47E−04 | 3.31E−02 |
| 44 | 1.30E−03 | 7.85E−03 | 5.53E−05 | 1.37E−02 |
| 45 | 1.30E−03 | 7.85E−03 | 5.53E−05 | 1.37E−02 |
| 46 | 1.30E−03 | 7.85E−03 | 5.53E−05 | 1.37E−02 |
| 47 | 1.30E−03 | 7.85E−03 | 5.53E−05 | 1.37E−02 |
| 48 | 1.97E−03 | 4.47E−03 | 5.53E−05 | 1.39E−02 |
| 49 | 1.30E−03 | 7.85E−03 | 5.53E−05 | 1.37E−02 |
| 50 | 1.30E−03 | 7.85E−03 | 5.53E−05 | 1.37E−02 |

TABLE 10f
Data for Klebsiella, particularly K. oxytoca (continued)

| | | | | |
|---|---|---|---|---|
| No. | Locus.Tag | Gene.Symbol | GenBank.Accession | Chromosome |

| | | | |
|---|---|---|---|
| 1 | KPK_2590 | | YP_002238421 |
| 2 | HMPREF0485_01216 | | ZP_06548816 |
| 3 | EAE_11985 | | YP_004592590 |
| 4 | Kvar_2784 | | YP_003439702 |
| 5 | HMPREF0484_4675 | add | ZP_06017656 |
| 6 | Kvar_2381 | | YP_003439305 |
| 7 | KPN2242_04295 | | AEJ96779 |
| 8 | HMPREF0485_01916 | | ZP_06549516 |
| 9 | HMPREF0485_01247 | | ZP_06548847 |
| 10 | KPK_2622 | | YP_002238453 |
| 11 | Kvar_2568 | | YP_003439490 |
| 12 | Kvar_0816 | | YP_003437758 |
| 13 | Kvar_4643 | | YP_003441547 |
| 14 | Kvar_3771 | | YP_003440683 |
| 15 | Kvar_1596 | | YP_003438533 |
| 16 | HMPREF0485_03998 | | ZP_06551594 |
| 17 | Kvar_2140 | | YP_003439069 |
| 18 | Kvar_3380 | | YP_003440292 |
| 19 | HMPREF0485_00446 | | ZP_06548046 |
| 20 | KPN_00275 | | YP_001333958 |
| 21 | Kvar_1589 | | YP_003438526 |
| 22 | Kvar_1856 | | YP_003438789 |
| 23 | KP1_3016 | | YP_002919724 |
| 24 | Kvar_5099 | | YP_003442002 |
| 25 | Kvar_0479 | | YP_003437421 |
| 26 | HMPREF0485_00450 | | ZP_06548050 |
| 27 | Kvar_1586 | | YP_003438523 |
| 28 | Kvar_1598 | | YP_003438535 |
| 29 | Kvar_1597 | | YP_003438534 |
| 30 | HMPREF0485_00443 | | ZP_06548043 |
| 31 | HMPREF0485_00453 | | ZP_06548053 |
| 32 | KP1_2851 | | YP_002919569 |
| 33 | KPN2242_01120 | | AEJ96149 |
| 34 | KPK_2936 | | YP_002238762 |
| 35 | HMPREF9538_03901 | | ZP_08306208 |
| 36 | HMPREF0485_02477 | | ZP_06550077 |
| 37 | HMPREF0485_01831 | | ZP_06549431 |
| 38 | Kvar_3395 | | YP_003440307 |
| 39 | Kvar_3210 | | YP_003440127 |
| 40 | KPN_00277 | | YP_001333960 |
| 41 | Kvar_1604 | | YP_003438541 |
| 42 | Kvar_4545 | | YP_003441451 |
| 43 | HMPREF9538_05113 | | ZP_08307402 |
| 44 | Kvar_4742 | | YP_003441646 |
| 45 | Kvar_2570 | | YP_003439492 |
| 46 | Kvar_2569 | | YP_003439491 |
| 47 | KPN_04505 | melA | YP_001338127 |
| 48 | KPK_1698 | nifA | YP_002237549 |
| 49 | Dda3937_02155 | nifH | YP_003884784 |
| 50 | KPK_1712 | nifK | YP_002237563 |

TABLE 10g
Data for Klebsiella, particularly K. oxytoca (continued)

| No. | Start.Coord | End.Coord | Strand | Scaffold.ID |
|---|---|---|---|---|
| 1 | 2648871 | 2649476 | + | 643348533 |
| 2 | 1355295 | 1356167 | − | 647536389 |
| 3 | 2576463 | 2577677 | − | 650716122 |
| 4 | 2889784 | 2890686 | − | 646312028 |
| 5 | 12390 | 13076 | + | 647009977 |
| 6 | 2489613 | 2491040 | + | 646312028 |
| 7 | 925860 | 926771 | − | 651053122 |
| 8 | 237063 | 237326 | + | 647536390 |
| 9 | 1387256 | 1388314 | + | 647536389 |
| 10 | 2680912 | 2681727 | + | 643348533 |
| 11 | 2679911 | 2680687 | + | 646312028 |
| 12 | 851698 | 852411 | + | 646312028 |
| 13 | 4934923 | 4936932 | + | 646312028 |
| 14 | 3964905 | 3966425 | + | 646312028 |
| 15 | 1721712 | 1722182 | − | 646312028 |
| 16 | 140912 | 141796 | + | 647536393 |
| 17 | 2255010 | 2255996 | + | 646312028 |
| 18 | 3519306 | 3520322 | − | 646312028 |
| 19 | 523538 | 524377 | − | 647536389 |
| 20 | 311624 | 312142 | + | 640753018 |
| 21 | 1716249 | 1716779 | + | 646312028 |
| 22 | 1971206 | 1973212 | − | 646312028 |
| 23 | 2878963 | 2879583 | + | 646564530 |
| 24 | 5455245 | 5456423 | − | 646312028 |
| 25 | 509672 | 510736 | + | 646312028 |
| 26 | 528513 | 529175 | − | 647536389 |
| 27 | 1711303 | 1712709 | − | 646312028 |
| 28 | 1723564 | 1724937 | − | 646312028 |
| 29 | 1722169 | 1723554 | − | 646312028 |
| 30 | 520902 | 521159 | − | 647536389 |
| 31 | 531062 | 532510 | − | 647536389 |
| 32 | 2717504 | 2718439 | + | 646564530 |
| 33 | 230663 | 231895 | − | 651053122 |
| 34 | 2983904 | 2984626 | + | 643348533 |
| 35 | 15395 | 16450 | + | 651333420 |
| 36 | 872347 | 873972 | + | 647536390 |
| 37 | 149922 | 150884 | − | 647536390 |
| 38 | 3535340 | 3535786 | + | 646312028 |
| 39 | 3340882 | 3341376 | − | 646312028 |
| 40 | 312969 | 315452 | + | 640753018 |
| 41 | 1730820 | 1734335 | + | 646312028 |
| 42 | 4822901 | 4823620 | + | 646312028 |
| 43 | 52 | 390 | − | 651333602 |
| 44 | 5039066 | 5040004 | + | 646312028 |
| 45 | 2681431 | 2682066 | + | 646312028 |
| 46 | 2680692 | 2681420 | + | 646312028 |
| 47 | 4930190 | 4931542 | + | 640753018 |
| 48 | 1752865 | 1754439 | − | 643348533 |
| 49 | 4321869 | 4322750 | − | 648028072 |
| 50 | 1766440 | 1768002 | − | 643348533 |

TABLE 11a
Data for Klebsiella, particularly K. pneumoniae

| | Scaffold.External. | | |
|---|---|---|---|
| No. | Accession | Scaffold.Name | best_pv |
| 1 | NC_007384 | Shigella sonnei Ss046: NC_007384 | 1.21395823682916e−119 |
| 2 | NC_011083 | Salmonella enterica subsp. enterica serovar Heidelberg str. SL476: | 1.70517984237646e−115 |
| | | NC_011083 | |
| 3 | NZ_ADWV01000045 | Escherichia coli MS 107-1 E_coliMS107-1-1.0.1_Cont44.1: | 3.12333368944279e−110 |
| | | NZ_ADWV01000045 | |
| 4 | NC_009651 | Klebsiella pneumoniae subsp. pneumoniae MGH 78578 plasmid pKPN5: | 1.8490215255217e−103 |
| | | NC_009651 | |
| 5 | NZ_ABFH01000001 | Salmonella enterica subsp. enterica serovar Virchow str. SL491, | 4.16211077482132e−97 |
| | | unfinished sequence: NZ_ABFH01000001 | |
| 6 | CP002910 | Klebsiella pneumoniae KCTC 2242: CP002910 | 1.34397014479151e−80 |
| 7 | CP002910 | Klebsiella pneumoniae KCTC 2242: CP002910 | 1.21342816034335e−71 |
| 8 | NZ_ACZD01000070 | Klebsiella pneumoniae subsp. rhinoscleromatis ATCC 13884 | 4.42089689687353e−61 |
| | | contig00070: NZ_ACZD01000070 | |
| 9 | NC_013850 | Klebsiella variicola At-22 chromosome: NC_013850 | 8.41004168548543e−61 |
| 10 | NC_011282 | Klebsiella pneumoniae 342 plasmid pKP187: NC_011282 | 8.41004168548543e−61 |
| 11 | NZ_ACZD01000070 | Klebsiella pneumoniae subsp. rhinoscleromatis ATCC 13884 | 8.41004168548543e−61 |
| | | contig00070: NZ_ACZD01000070 | |
| 12 | NZ_ADTP01000323 | Escherichia coli MS 69-1 E_coli69-1-1.0_Cont630.1: NZ_ADTP01000323 | 4.94539115664213e−60 |
| 13 | NC_009793 | Citrobacter koseri ATCC BAA-895 plasmid pCK03: NC_009793 | 5.71878021049123e−59 |
| 14 | NZ_ACZD01000005 | Klebsiella pneumoniae subsp. rhinoscleromatis ATCC 13884 | 1.22977045856913e−58 |
| | | contig00005: NZ_ACZD01000005 | |
| 15 | NZ_ACZD01000127 | Klebsiella pneumoniae subsp. rhinoscleromatis ATCC 13884 | 1.49068550300511e−58 |
| | | contig00129: NZ_ACZD01000127 | |
| 16 | NZ_GG745515 | Klebsiella sp. 1_1_55 genomic scaffold supercont1.8: NZ_GG745515 | 7.09566707309011e−58 |
| 17 | NZ_AAJX01000089 | Escherichia coli B171, unfinished sequence: NZ_AAJX01000089 | 1.65409147045657e−56 |
| 18 | NZ_ACZD01000005 | Klebsiella pneumoniae subsp. rhinoscleromatis ATCC 13884 | 7.54090407593199e−55 |
| | | contig00005: NZ_ACZD01000005 | |
| 19 | NZ_AFBO01000042 | Klebsiella sp. MS 92-3 K_spMS92-3-1.0_Cont91.1: NZ_AFBO01000042 | 2.8348333685311e−54 |
| 20 | NC_009649 | Klebsiella pneumoniae subsp. pneumoniae MGH 78578 plasmid pKPN3: | 2.8348333685311e−54 |
| | | NC_009649 | |
| 21 | CP002910 | Klebsiella pneumoniae KCTC 2242: CP002910 | 2.83530891190408e−54 |
| 22 | NC_009649 | Klebsiella pneumoniae subsp. pneumoniae MGH 78578 plasmid pKPN3: | 4.89541334527925e−54 |
| | | NC_009649 | |
| 23 | NZ_AFBO01000042 | Klebsiella sp. MS 92-3 K_spMS92-3-1.0_Cont91.1: NZ_AFBO01000042 | 2.18592863711471e−53 |
| 24 | NC_009649 | Klebsiella pneumoniae subsp. pneumoniae MGH 78578 plasmid pKPN3: | 2.18592863711471e−53 |
| | | NC_009649 | |
| 25 | NZ_ACZD01000127 | Klebsiella pneumoniae subsp. rhinoscleromatis ATCC 13884 | 1.08576020331202e−52 |
| | | contig00129: NZ_ACZD01000127 | |
| 26 | NZ_ACZD01000127 | Klebsiella pneumoniae subsp. rhinoscleromatis ATCC 13884 | 1.37521017661703e−52 |
| | | contig00129: NZ_ACZD01000127 | |
| 27 | NZ_ACZD01000127 | Klebsiella pneumoniae subsp. rhinoscleromatis ATCC 13884 | 2.1362800317976e−52 |
| | | contig00129: NZ_ACZD01000127 | |
| 28 | NC_014121 | Enterobacter cloacae subsp. cloacae ATCC 13047 chromosome: NC_014121 | 2.21381524453565e−51 |
| 29 | CP002910 | Klebsiella pneumoniae KCTC 2242: CP002910 | 6.53846908249994e−51 |
| 30 | NZ_GG745512 | Klebsiella sp. 1_1_55 genomic scaffold supercont1.5: NZ_GG745512 | 2.78992804201171e−50 |
| 31 | NZ_CAAZ01000154 | Salmonella enterica subsp. enterica serovar Typhi str. E98-3139, | 4.10919139010377e−50 |
| | | unfinished sequence: NZ_CAAZ01000154 | |
| 32 | NZ_ACZD01000127 | Klebsiella pneumoniae subsp. rhinoscleromatis ATCC 13884 | 6.10670380866266e−50 |
| | | contig00129: NZ_ACZD01000127 | |
| 33 | NZ_ACZD01000127 | Klebsiella pneumoniae subsp. rhinoscleromatis ATCC 13884 | 1.00996840886331e−49 |
| | | contig00129: NZ_ACZD01000127 | |
| 34 | CP002910 | Klebsiella pneumoniae KCTC 2242: CP002910 | 1.33344542353295e−48 |
| 35 | CP002910 | Klebsiella pneumoniae KCTC 2242: CP002910 | 3.00269800428115e−48 |
| 36 | CP002910 | Klebsiella pneumoniae KCTC 2242: CP002910 | 3.13126971411145e−48 |
| 37 | NZ_ACZD01000127 | Klebsiella pneumoniae subsp. rhinoscleromatis ATCC 13884 | 3.13126971411145e−48 |
| | | contig00129: NZ_ACZD01000127 | |
| 38 | NC_014121 | Enterobacter cloacae subsp. cloacae ATCC 13047 chromosome: NC_014121 | 3.79149056816214e−48 |
| 39 | NZ_AFBO01000625 | Klebsiella sp. MS 92-3 K_spMS92-3-1.0_Cont1175.2: NZ_AFBO01000625 | 2.5975548233422e−47 |
| 40 | NZ_ACZD01000127 | Klebsiella pneumoniae subsp. rhinoscleromatis ATCC 13884 | 1.05391699509183e−46 |
| | | contig00129: NZ_ACZD01000127 | |
| 41 | NC_011092 | Salmonella enterica subsp. enterica serovar Schwarzengrund str. | 4.42178242563847e−46 |
| | | CVM19633 plasmid pCVM19633_110: NC_011092 | |
| 42 | NC_013850 | Klebsiella variicola At-22 chromosome: NC_013850 | 6.65483065085068e−46 |
| 43 | NC_012912 | Dickeya zeae Ech1591: NC_012912 | 1.05262166415392e−45 |
| 44 | NC_013509 | Edwardsiella tarda EIB202 plasmid pEIB202: NC_013509 | 1.24074600175825e−45 |
| 45 | AP011957 | Salmonella enterica subsp. enterica serovar Typhimurium str. T000240 | 2.46270503642371e−45 |
| | | DNA: AP011957 | |
| 46 | NC_006856 | Salmonella enterica subsp. enterica serovar Choleraesuis str. SC-B67 | 9.02631418377704e−45 |
| | | plasmid pSC138: NC_006856 | |
| 47 | AP011957 | Salmonella enterica subsp. enterica serovar Typhimurium str. T000240 | 3.37821430101762e−44 |
| | | DNA: AP011957 | |
| 48 | NZ_AFBO01000232 | Klebsiella sp. MS 92-3 K_spMS92-3-1.0_Cont505.1: NZ_AFBO01000232 | 4.87973844618098e−43 |
| 49 | NC_004631 | Salmonella enterica subsp. enterica serovar Typhi Ty2: NC_004631 | 1.54269244019591e−42 |
| 50 | NC_006625 | Klebsiella pneumoniae NTUH-K2044 plasmid pK2044: NC_006625 | 1.89874529968327e−42 |

TABLE 11b
Data for Klebsiella, particularly K. pneumoniae (continued)

| No. | sign_phenos | sign_phenos_class | best_pheno | best_pheno_class |
|---|---|---|---|---|
| 1 | A/S; AUG; AZT; CAX; CAZ; CFT; CP; CPE; CRM; | aminoglycoside; fluoroquinolone; lactam; other | TO | aminoglycoside |
| | ETP; GM; LVX; P/T; TO; T/S | | | |
| 2 | A/S; AUG; AZT; CAX; CAZ; CFT; CP; CPE; CRM; | aminoglycoside; fluoroquinolone; lactam; other | AUG | lactam |
| | ETP; GM; LVX; P/T; TO; T/S | | | |
| 3 | A/S; AUG; AZT; CAX; CAZ; CFT; CP; CPE; CRM; | aminoglycoside; fluoroquinolone; lactam; other | T/S | other |
| | ETP; GM; LVX; P/T; TO; T/S | | | |
| 4 | A/S; AUG; AZT; CAX; CAZ; CFT; CP; CPE; CRM; | aminoglycoside; fluoroquinolone; lactam; other | T/S | other |
| | ETP; GM; LVX; P/T; TO; T/S | | | |
| 5 | A/S; AUG; AZT; CAX; CAZ; CFT; CP; CPE; CRM; | aminoglycoside; fluoroquinolone; lactam; other | T/S | other |
| | ETP; GM; LVX; P/T; TO; T/S | | | |
| 6 | A/S; AUG; AZT; CAX; CAZ; CFT; CP; CPE; CRM; | aminoglycoside; fluoroquinolone; lactam; other | ETP | lactam |
| | ETP; GM; LVX; P/T; TO; T/S | | | |
| 7 | A/S; AUG; AZT; CAX; CAZ; CFT; CP; CPE; CRM; | aminoglycoside; fluoroquinolone; lactam; other | ETP | lactam |
| | ETP; GM; LVX; P/T; TO; T/S | | | |
| 8 | A/S; AUG; AZT; CAX; CAZ; CFT; CP; CPE; CRM; | aminoglycoside; fluoroquinolone; lactam; other | ETP | lactam |
| | ETP; CM; LVX; P/T; TO; T/S | | | |
| 9 | A/S; AUG; AZT; CAX; CAZ; CFT; CP; CPE; CRM; | aminoglycoside; fluoroquinolone; lactam; other | ETP | lactam |
| | ETP; GM; LVX; P/T; TO; T/S | | | |
| 10 | A/S; AUG; AZT; CAX; CAZ; CFT; CP; CPE; CRM; | aminoglycoside; fluoroquinolone; lactam; other | ETP | lactam |
| | ETP; GM; LVX; P/T; TO; T/S | | | |
| 11 | A/S; AUG; AZT; CAX; CAZ; CFT; CP; CPE; CRM; | aminoglycoside; fluoroquinolone; lactam; other | ETP | lactam |
| | ETP; GM; LVX; P/T; TO; T/S | | | |
| 12 | A/S; AUG; AZT; CAX; CAZ; CFT; CP; CPE; CRM; | aminoglycoside; fluoroquinolone; lactam; other | CAZ | lactam |
| | ETP; GM; LVX; P/T; TO; T/S | | | |
| 13 | A/S; AUG; AZT; CAX; CAZ; CFT; CP; CPE; CRM; | aminoglycoside; fluoroquinolone; lactam; other | AUG | lactam |
| | ETP; GM; LVX; P/T; TO; T/S | | | |
| 14 | A/S; AUG; AZT; CAX; CAZ; CFT; CP; CPE; CRM; | aminoglycoside; fluoroquinolone; lactam; other | ETP | lactam |
| | ETP; GM; LVX; P/T; TO; T/S | | | |
| 15 | A/S; AUG; AZT; CAX; CAZ; CFT; CP; CPE; CRM; | aminoglycoside; fluoroquinolone; lactam; other | TO | aminoglycoside |
| | ETP; GM; LVX; P/T; TO; T/S | | | |
| 16 | A/S; AUG; AZT; CAX; CAZ; CFT; CP; CPE; CRM; | aminoglycoside; fluoroquinolone; lactam; other | ETP | lactam |
| | ETP; GM; LVX; P/T; TO; T/S | | | |
| 17 | A/S; AUG; AZT; CAX; CAZ; CFT; CP; CPE; CRM; | aminoglycoside; fluoroquinolone; lactam; other | T/S | other |
| | ETP; GM; LVX; P/T; TO; T/S | | | |
| 18 | A/S; AUG; AZT; CAX; CAZ; CFT; CP; CPE; CRM; | aminoglycoside; fluoroquinolone; lactam; other | ETP | lactam |
| | ETP; GM; LVX; P/T; TO; T/S | | | |
| 19 | A/S; AUG; AZT; CAX; CAZ; CFT; CP; CPE; CRM; | aminoglycoside; fluoroquinolone; lactam; other | P/T | lactam |
| | ETP; GM; LVX; P/T; TO; T/S | | | |
| 20 | A/S; AUG; AZT; CAX; CAZ; CFT; CP; CPE; CRM; | aminoglycoside; fluoroquinolone; lactam; other | P/T | lactam |
| | ETP; GM; LVX; P/T; TO; T/S | | | |
| 21 | A/S; AUG; AZT; CAX; CAZ; CFT; CP; CPE; CRM; | aminoglycoside; fluoroquinolone; lactam; other | TO | aminoglycoside |
| | ETP; GM; LVX; P/T; TO; T/S | | | |
| 22 | A/S; AUG; AZT; CAX; CAZ; CFT; CP; CPE; CRM; | aminoglycoside; fluoroquinolone; lactam; other | P/T | lactam |
| | ETP; GM; LVX; P/T; TO; T/S | | | |
| 23 | A/S; AUG; AZT; CAX; CAZ; CFT; CP; CPE; CRM; | aminoglycoside; fluoroquinolone; lactam; other | P/T | lactam |
| | ETP; GM; LVX; P/T; TO; T/S | | | |
| 24 | A/S; AUG; AZT; CAX; CAZ; CFT; CP; CPE; CRM; | aminoglycoside; fluoroquinolone; lactam; other | P/T | lactam |
| | ETP; GM; LVX; P/T; TO; T/S | | | |
| 25 | A/S; AUG; AZT; CAX; CAZ; CFT; CP; CPE; CRM; | aminoglycoside; fluoroquinolone; lactam; other | TO | aminoglycoside |
| | ETP; GM; LVX; P/T; TO; T/S | | | |
| 26 | A/S; AUG; AZT; CAX; CAZ; CFT; CP; CPE; CRM; | aminoglycoside; fluoroquinolone; lactam; other | TO | aminoglycoside |
| | ETP; GM; LVX; P/T; TO; T/S | | | |
| 27 | A/S; AUG; AZT; CAX; CAZ; CFT; CP; CPE; CRM; | aminoglycoside; fluoroquinolone; lactam; other | TO | aminoglycoside |
| | ETP; GM; LVX; P/T; TO; T/S | | | |
| 28 | A/S; AUG; AZT; CAX; CAZ; CFT; CP; CPE; CRM; | aminoglycoside; fluoroquinolone; lactam; other | CP | fluoroquinolone |
| | ETP; GM; LVX; P/T; TO; T/S | | | |
| 29 | A/S; AUG; AZT; CAX; CAZ; CFT; CP; CPE; CRM; | aminoglycoside; fluoroquinolone; lactam; other | CP | fluoroquinolone |
| | ETP; GM; LVX; P/T; TO; T/S | | | |
| 30 | A/S; AUG; AZT; CAX; CAZ; CFT; CP; CPE; CRM; | aminoglycoside; fluoroquinolone; lactam; other | ETP | lactam |
| | ETP; GM; LVX; P/T; TO; T/S | | | |
| 31 | A/S; AUG; AZT; CAX; CAZ; CFT; CP; CPE; CRM; | aminoglycoside; fluoroquinolone; lactam; other | CP | fluoroquinolone |
| | ETP; GM; LVX; P/T; TO; T/S | | | |
| 32 | A/S; AUG; AZT; CAX; CAZ; CFT; CP; CPE; CRM; | aminoglycoside; fluoroquinolone; lactam; other | CP | fluoroquinolone |
| | ETP; GM; LVX; P/T; TO; T/S | | | |
| 33 | A/S; AUG; AZT; CAX; CAZ; CFT; CP; CPE; CRM; | aminoglycoside; fluoroquinolone; lactam; other | CP | fluoroquinolone |
| | ETP; GM; LVX; P/T; TO; T/S | | | |
| 34 | A/S; AUG; AZT; CAX; CAZ; CFT; CP; CPE; CRM; | aminoglycoside; fluoroquinolone; lactam; other | CP | fluoroquinolone |
| | ETP; GM; LVX; P/T; TO; T/S | | | |
| 35 | A/S; AUG; AZT; CAX; CAZ; CFT; CP; CPE; CRM; | aminoglycoside; fluoroquinolone; lactam; other | CP | fluoroquinolone |
| | ETP; GM; LVX; P/T; TO; T/S | | | |
| 36 | A/S; AUG; AZT; CAX; CAZ; CFT; CP; CPE; CRM; | aminoglycoside; fluoroquinolone; lactam; other | CP | fluoroquinolone |
| | ETP; GM; LVX; P/T; TO; T/S | | | |
| 37 | A/S; AUG; AZT; CAX; CAZ; CFT; CP; CPE; CRM; | aminoglycoside; fluoroquinolone; lactam; other | CP | fluoroquinolone |
| | ETP; GM; LVX; P/T; TO; T/S | | | |
| 38 | A/S; AUG; AZT; CAX; CAZ; CFT; CP; CPE; CRM; | aminoglycoside; fluoroquinolone; lactam; other | CP | fluoroquinolone |
| | ETP; GM; LVX; P/T; TO; T/S | | | |
| 39 | A/S; AUG; AZT; CAX; CAZ; CFT; CP; CPE; CRM; | aminoglycoside; fluoroquinolone; lactam; other | T/S | other |
| | CM; LVX; P/T; TO; T/S | | | |
| 40 | A/S; AUG; AZT; CAX; CAZ; CFT; CP; CPE; CRM; | aminoglycoside; fluoroquinolone; lactam; other | CP | fluoroquinolone |
| | ETP; GM; LVX; P/T; TO; T/S | | | |
| 41 | A/S; AUG; AZT; CAX; CAZ; CFT; CP; CPE; CRM; | aminoglycoside; fluoroquinolone; lactam; other | AUG | lactam |
| | ETP; GM; LVX; P/T; TO; T/S | | | |
| 42 | AUG; AZT; CAX; CAZ; CFT; CP; CPE; CRM; ETP ; | aminoglycoside; fluoroquinolone; lactam; other | ETP | lactam |
| | LVX; P/T; TO; T/S | | | |
| 43 | AUG; AZT; CAX; CAZ; CFT; CP; CPE; CRM; ETP ; | aminoglycoside; fluoroquinolone; lactam; other | ETP | lactam |
| | LVX; P/T; TO; T/S | | | |
| 44 | A/S; AUG; AZT; CAX; CAZ; CFT; CP; CPE; CRM; | aminoglycoside; fluoroquinolone; lactam; other | T/S | other |
| | ETP; GM; LVX; P/T; TO; T/S | | | |
| 45 | A/S; AUG; AZT; CAX; CAZ; CFT; CP; CPE; CRM; | aminoglycoside; fluoroquinolone; lactam; other | TO | aminoglycoside |
| | ETP; GM; LVX; P/T; TO; T/S | | | |
| 46 | A/S; AUG; AZT; CAX; CAZ; CFT; CP; CPE; CRM; | aminoglycoside; fluoroquinolone; lactam; other | TO | aminoglycoside |
| | ETP; GM; LVX; P/T; TO; T/S | | | |
| 47 | A/S; AUG; AZT; CAX; CAZ; CFT; CP; CPE; CRM; | aminoglycoside; fluoroquinolone; lactam; other | AUG | lactam |
| | ETP; GM; LVX; P/T; TO; T/S | | | |
| 48 | A/S; AUG; AZT; CAX; CAZ; CFT; CP; CPE; CRM; | aminoglycoside; fluoroquinolone; lactam; other | T/S | other |
| | ETP; GM; LVX; P/T; TO; T/S | | | |
| 49 | A/S; AUG; AZT; CAX; CAZ; CFT; CP; CPE; CRM; | aminoglycoside; fluoroquinolone; lactam; other | ETP | lactam |
| | ETP; GM; LVX; P/T; TO; T/S | | | |
| 50 | A/S; AUG; AZT; CAX; CAZ; CFT; CP; CPE; CRM; | aminoglycoside; fluoroquinolone; lactam; other | T/S | other |
| | ETP; GM; LVX; P/T; TO; T/S | | | |

TABLE 11c
Data for Klebsiella, particularly K. pneumoniae (continued)

| No. | num_aminoglycoside | num_fluoroquinolone | num_lactam | num_other |
|---|---|---|---|---|
| 1 | 2 | 2 | 10 | 1 |
| 2 | 2 | 2 | 10 | 1 |
| 3 | 2 | 2 | 10 | 1 |
| 4 | 2 | 2 | 10 | 1 |
| 5 | 2 | 2 | 10 | 1 |
| 6 | 2 | 2 | 10 | 1 |
| 7 | 2 | 2 | 10 | 1 |
| 8 | 2 | 2 | 10 | 1 |
| 9 | 2 | 2 | 10 | 1 |
| 10 | 2 | 2 | 10 | 1 |
| 11 | 2 | 2 | 10 | 1 |
| 12 | 2 | 2 | 10 | 1 |
| 13 | 2 | 2 | 10 | 1 |
| 14 | 2 | 2 | 10 | 1 |
| 15 | 2 | 2 | 10 | 1 |
| 16 | 2 | 2 | 10 | 1 |
| 17 | 2 | 2 | 10 | 1 |
| 18 | 2 | 2 | 10 | 1 |
| 19 | 2 | 2 | 10 | 1 |
| 20 | 2 | 2 | 10 | 1 |
| 21 | 2 | 2 | 10 | 1 |
| 22 | 2 | 2 | 10 | 1 |
| 23 | 2 | 2 | 10 | 1 |
| 24 | 2 | 2 | 10 | 1 |
| 25 | 2 | 2 | 10 | 1 |
| 26 | 2 | 2 | 10 | 1 |
| 27 | 2 | 2 | 10 | 1 |
| 28 | 2 | 2 | 10 | 1 |
| 29 | 2 | 2 | 10 | 1 |
| 30 | 2 | 2 | 10 | 1 |
| 31 | 2 | 2 | 10 | 1 |
| 32 | 2 | 2 | 10 | 1 |
| 33 | 2 | 2 | 10 | 1 |
| 34 | 2 | 2 | 10 | 1 |
| 35 | 2 | 2 | 10 | 1 |
| 36 | 2 | 2 | 10 | 1 |
| 37 | 2 | 2 | 10 | 1 |
| 38 | 2 | 2 | 10 | 1 |
| 39 | 2 | 2 | 9 | 1 |
| 40 | 2 | 2 | 10 | 1 |
| 41 | 2 | 2 | 10 | 1 |
| 42 | 1 | 2 | 9 | 1 |
| 43 | 1 | 2 | 9 | 1 |
| 44 | 2 | 2 | 10 | 1 |
| 45 | 2 | 2 | 10 | 1 |
| 46 | 2 | 2 | 10 | 1 |
| 47 | 2 | 2 | 10 | 1 |
| 48 | 2 | 2 | 10 | 1 |
| 49 | 2 | 2 | 10 | 1 |
| 50 | 2 | 2 | 10 | 1 |

TABLE 11d
Data for Klebsiella, particularly K. pneumoniae (continued)

| No. | A/S_pv_adj | AUG_pv_adj | AZT_pv_adj | CAX_pv_adj | CAZ_pv_adj |
|---|---|---|---|---|---|
| 1 | 1.28E−76 | 1.24E−105 | 4.06E−95 | 3.39E−95 | 5.99E−93 |
| 2 | 1.18E−98 | 1.71E−115 | 9.09E−91 | 6.55E−88 | 1.66E−96 |
| 3 | 1.08E−81 | 5.85E−86 | 2.76E−94 | 4.16E−97 | 6.84E−100 |
| 4 | 5.55E−76 | 3.05E−84 | 1.38E−91 | 2.64E−96 | 5.33E−94 |
| 5 | 1.22E−70 | 3.41E−71 | 1.41E−80 | 1.50E−83 | 6.22E−90 |
| 6 | 7.70E−21 | 1.03E−41 | 8.20E−48 | 2.50E−44 | 2.69E−46 |
| 7 | 8.54E−16 | 4.34E−29 | 4.54E−38 | 5.50E−34 | 1.34E−34 |
| 8 | 2.62E−12 | 1.74E−24 | 1.49E−26 | 2.74E−25 | 2.84E−24 |
| 9 | 5.20E−12 | 2.50E−24 | 3.69E−26 | 7.31E−25 | 7.66E−24 |
| 10 | 5.20E−12 | 2.50E−24 | 3.69E−26 | 7.31E−25 | 7.66E−24 |
| 11 | 5.20E−12 | 2.50E−24 | 3.69E−26 | 7.31E−25 | 7.66E−24 |
| 12 | 3.32E−43 | 1.75E−59 | 1.48E−54 | 9.28E−55 | 4.95E−60 |
| 13 | 2.41E−43 | 5.72E−59 | 4.20E−53 | 2.96E−53 | 2.14E−58 |
| 14 | 2.47E−16 | 8.57E−27 | 1.49E−34 | 1.96E−31 | 8.83E−33 |
| 15 | 1.72E−35 | 6.40E−55 | 1.25E−44 | 4.12E−43 | 1.61E−46 |
| 16 | 3.04E−18 | 5.19E−32 | 4.83E−36 | 2.23E−35 | 1.91E−32 |
| 17 | 1.02E−47 | 9.19E−45 | 1.85E−48 | 9.17E−53 | 6.18E−56 |
| 18 | 3.51E−17 | 3.04E−23 | 8.29E−30 | 1.21E−27 | 9.29E−29 |
| 19 | 1.03E−40 | 7.90E−52 | 1.41E−37 | 4.81E−39 | 9.97E−38 |
| 20 | 1.03E−40 | 7.90E−52 | 1.41E−37 | 4.81E−39 | 9.97E−38 |
| 21 | 8.56E−34 | 4.84E−53 | 8.75E−43 | 2.41E−41 | 9.43E−45 |
| 22 | 5.13E−42 | 1.10E−52 | 3.02E−38 | 9.55E−40 | 3.15E−38 |
| 23 | 1.11E−41 | 3.84E−52 | 1.00E−37 | 3.11E−39 | 8.03E−38 |
| 24 | 1.11E−41 | 3.84E−52 | 1.00E−37 | 3.11E−39 | 8.03E−38 |
| 25 | 8.85E−33 | 1.54E−51 | 2.83E−42 | 1.24E−40 | 2.88E−44 |
| 26 | 1.96E−32 | 2.54E−52 | 2.98E−42 | 1.41E−40 | 3.55E−44 |
| 27 | 5.12E−32 | 6.70E−50 | 1.84E−40 | 2.34E−38 | 1.33E−42 |
| 28 | 1.65E−30 | 3.00E−47 | 1.96E−38 | 1.37E−36 | 4.94E−39 |
| 29 | 4.43E−31 | 1.45E−47 | 2.29E−39 | 1.06E−37 | 3.63E−40 |
| 30 | 6.99E−12 | 2.37E−26 | 2.77E−24 | 5.28E−24 | 2.55E−26 |
| 31 | 2.78E−31 | 7.62E−46 | 1.11E−38 | 5.40E−37 | 1.95E−39 |
| 32 | 9.62E−32 | 1.45E−47 | 2.29E−39 | 1.06E−37 | 3.63E−40 |
| 33 | 2.27E−31 | 2.28E−47 | 3.20E−39 | 1.66E−37 | 5.77E−40 |
| 34 | 9.74E−28 | 9.40E−43 | 1.44E−35 | 7.30E−34 | 3.24E−36 |
| 35 | 1.57E−28 | 2.77E−42 | 6.21E−36 | 1.59E−34 | 2.14E−36 |
| 36 | 3.41E−27 | 2.34E−43 | 7.21E−36 | 4.53E−33 | 9.07E−37 |
| 37 | 3.41E−27 | 2.34E−43 | 7.21E−36 | 4.53E−33 | 9.07E−37 |
| 38 | 2.00E−30 | 7.61E−47 | 1.00E−38 | 1.06E−37 | 3.63E−40 |
| 39 | 8.29E−47 | 2.48E−33 | 3.67E−37 | 5.57E−42 | 2.74E−43 |
| 40 | 1.53E−27 | 6.97E−43 | 2.91E−36 | 2.70E−35 | 5.96E−38 |
| 41 | 1.75E−44 | 4.42E−46 | 2.16E−37 | 1.21E−36 | 1.12E−42 |
| 42 | 4.51E−02 | 4.66E−12 | 9.77E−17 | 3.13E−16 | 9.90E−15 |
| 43 | 5.37E−02 | 5.73E−12 | 1.27E−16 | 6.11E−16 | 1.15E−14 |
| 44 | 6.65E−31 | 4.17E−32 | 1.40E−25 | 3.69E−27 | 1.78E−29 |
| 45 | 6.15E−34 | 5.78E−41 | 2.29E−36 | 9.94E−38 | 1.48E−38 |
| 46 | 3.01E−32 | 3.12E−38 | 7.22E−37 | 3.96E−36 | 6.00E−37 |
| 47 | 4.35E−41 | 3.38E−44 | 1.49E−30 | 1.42E−33 | 1.82E−29 |
| 48 | 6.41E−31 | 1.63E−41 | 3.24E−33 | 2.26E−36 | 1.97E−31 |
| 49 | 2.54E−11 | 2.61E−18 | 8.71E−21 | 1.23E−18 | 1.87E−19 |
| 50 | 2.38E−23 | 3.76E−29 | 2.21E−27 | 4.97E−29 | 1.37E−29 |

TABLE 11e
Data for Klebsiella, particularly K. pneumoniae (continued)

| No. | CFT_pv_adj | CP_pv_adj | CPE_pv_adj | CRM_pv_adj | ETP_pv_adj |
|---|---|---|---|---|---|
| 1 | 2.17E−99 | 2.40E−85 | 2.31E−68 | 1.21E−82 | 1.87E−58 |
| 2 | 2.52E−83 | 1.28E−61 | 4.61E−66 | 7.83E−57 | 8.20E−51 |
| 3 | 3.93E−93 | 2.17E−58 | 2.89E−43 | 3.32E−73 | 3.54E−24 |
| 4 | 1.52E−90 | 4.25E−60 | 1.75E−43 | 2.59E−71 | 1.63E−23 |
| 5 | 3.61E−77 | 1.76E−47 | 1.47E−36 | 5.14E−62 | 6.31E−21 |
| 6 | 2.84E−46 | 1.53E−54 | 2.89E−63 | 1.06E−36 | 1.34E−80 |
| 7 | 8.43E−36 | 1.96E−43 | 3.06E−55 | 3.95E−29 | 1.21E−71 |
| 8 | 5.55E−27 | 2.63E−33 | 6.90E−40 | 1.01E−20 | 4.42E−61 |
| 9 | 1.58E−26 | 5.49E−33 | 1.32E−39 | 2.40E−20 | 8.41E−61 |
| 10 | 1.58E−26 | 5.49E−33 | 1.32E−39 | 2.40E−20 | 8.41E−61 |
| 11 | 1.58E−26 | 5.49E−33 | 1.32E−39 | 4.98E−21 | 8.41E−61 |
| 12 | 4.39E−54 | 4.96E−60 | 1.80E−51 | 7.75E−50 | 7.02E−53 |
| 13 | 1.26E−52 | 1.35E−58 | 1.72E−50 | 4.57E−49 | 3.71E−52 |
| 14 | 1.28E−31 | 2.00E−30 | 6.27E−42 | 1.20E−29 | 1.23E−58 |
| 15 | 2.05E−41 | 2.56E−52 | 7.76E−46 | 3.74E−32 | 5.20E−48 |
| 16 | 1.52E−36 | 2.10E−37 | 5.58E−48 | 5.62E−28 | 7.10E−58 |
| 17 | 9.26E−49 | 4.16E−22 | 1.22E−19 | 9.42E−36 | 5.55E−05 |
| 18 | 6.27E−28 | 1.02E−25 | 4.83E−36 | 7.62E−29 | 7.54E−55 |
| 19 | 9.92E−40 | 2.65E−39 | 2.28E−41 | 4.71E−28 | 1.10E−32 |
| 20 | 9.92E−40 | 2.65E−39 | 2.28E−41 | 4.71E−28 | 1.10E−32 |
| 21 | 1.47E−40 | 1.18E−49 | 1.74E−45 | 2.18E−32 | 1.46E−46 |
| 22 | 2.00E−40 | 6.22E−40 | 7.04E−42 | 1.08E−28 | 5.10E−33 |
| 23 | 6.77E−40 | 2.32E−39 | 3.78E−41 | 2.22E−28 | 3.70E−32 |
| 24 | 6.77E−40 | 2.32E−39 | 3.78E−41 | 2.22E−28 | 3.70E−32 |
| 25 | 4.69E−40 | 3.62E−49 | 1.06E−44 | 1.70E−33 | 2.11E−45 |
| 26 | 4.89E−40 | 1.97E−49 | 1.88E−45 | 2.34E−32 | 8.59E−46 |
| 27 | 5.94E−39 | 1.13E−47 | 2.46E−43 | 3.44E−33 | 1.93E−49 |
| 28 | 3.32E−36 | 2.21E−51 | 1.87E−44 | 1.56E−31 | 1.83E−41 |
| 29 | 2.69E−37 | 6.54E−51 | 4.48E−44 | 2.19E−30 | 3.44E−41 |
| 30 | 1.39E−24 | 6.75E−31 | 1.12E−35 | 5.11E−15 | 2.79E−50 |
| 31 | 1.34E−36 | 4.11E−50 | 1.67E−43 | 1.45E−31 | 8.85E−41 |
| 32 | 2.69E−37 | 6.11E−50 | 4.48E−44 | 2.19E−30 | 3.44E−41 |
| 33 | 6.74E−37 | 1.01E−49 | 6.91E−44 | 1.07E−30 | 4.69E−41 |
| 34 | 3.28E−34 | 1.33E−48 | 1.41E−40 | 1.52E−30 | 7.40E−43 |
| 35 | 3.72E−36 | 3.00E−48 | 1.67E−40 | 8.05E−31 | 2.56E−43 |
| 36 | 1.04E−34 | 3.13E−48 | 5.88E−41 | 1.06E−29 | 3.84E−43 |
| 37 | 1.04E−34 | 3.13E−48 | 5.88E−41 | 1.06E−29 | 3.84E−43 |
| 38 | 2.69E−37 | 3.79E−48 | 4.21E−43 | 9.89E−32 | 5.95E−40 |
| 39 | 2.84E−38 | 3.78E−14 | 1.15E−05 | 9.70E−31 | 9.25E−01 |
| 40 | 1.88E−36 | 1.05E−46 | 3.80E−41 | 1.01E−30 | 2.77E−43 |
| 41 | 4.01E−36 | 1.78E−19 | 2.93E−16 | 1.27E−21 | 2.46E−10 |
| 42 | 5.45E−16 | 4.08E−18 | 6.25E−28 | 7.56E−08 | 6.65E−46 |
| 43 | 1.13E−15 | 5.57E−18 | 9.82E−28 | 1.16E−07 | 1.05E−45 |
| 44 | 2.55E−25 | 6.58E−14 | 7.47E−22 | 3.89E−16 | 2.18E−20 |
| 45 | 5.14E−35 | 2.41E−27 | 5.02E−15 | 4.61E−29 | 2.22E−12 |
| 46 | 1.40E−36 | 2.78E−33 | 1.06E−29 | 5.12E−30 | 2.25E−28 |
| 47 | 3.46E−32 | 1.18E−32 | 1.62E−32 | 2.49E−29 | 1.62E−26 |
| 48 | 6.74E−36 | 1.36E−34 | 2.38E−34 | 1.27E−25 | 6.79E−29 |
| 49 | 9.64E−20 | 3.40E−22 | 1.36E−30 | 8.87E−18 | 1.54E−42 |
| 50 | 1.19E−26 | 1.97E−18 | 9.42E−19 | 1.46E−19 | 1.52E−12 |

TABLE 11f
Data for Klebsiella, particularly K. pneumoniae (continued)

| No. | GM_pv_adj | LVX_pv_adj | P/T_pv_adj | TO_pv_adj | T/S_pv_adj |
|---|---|---|---|---|---|
| 1 | 6.24E−60 | 3.97E−80 | 7.18E−96 | 1.21E−19 | 1.12E−106 |
| 2 | 6.10E−67 | 3.76E−55 | 1.20E−67 | 2.77E−05 | 3.59E−83 |
| 3 | 6.00E−68 | 3.14E−50 | 5.58E−70 | 1.37E−91 | 3.12E−110 |
| 4 | 3.06E−63 | 4.39E−52 | 7.17E−70 | 6.65E−91 | 1.85E−103 |
| 5 | 5.29E−59 | 6.80E−39 | 4.00E−51 | 1.40E−82 | 4.16E−97 |
| 6 | 5.64E−09 | 3.19E−59 | 3.01E−52 | 7.11E−48 | 1.50E−31 |
| 7 | 1.61E−05 | 6.12E−48 | 2.20E−40 | 1.45E−34 | 2.10E−20 |
| 8 | 1.57E−06 | 6.85E−37 | 6.06E−35 | 1.79E−29 | 2.02E−18 |
| 9 | 2.46E−06 | 1.41E−36 | 1.30E−34 | 3.62E−29 | 2.62E−18 |
| 10 | 2.46E−06 | 1.41E−36 | 1.30E−34 | 3.62E−29 | 2.62E−18 |
| 11 | 2.46E−06 | 1.41E−36 | 1.30E−34 | 3.62E−29 | 2.62E−18 |
| 12 | 2.30E−25 | 1.32E−53 | 6.01E−52 | 5.28E−59 | 5.07E−39 |
| 13 | 1.61E−25 | 2.14E−52 | 1.19E−50 | 1.22E−58 | 6.30E−38 |
| 14 | 6.89E−05 | 6.38E−32 | 9.66E−29 | 7.19E−31 | 3.05E−15 |
| 15 | 1.55E−23 | 1.89E−48 | 1.36E−48 | 1.49E−58 | 1.23E−46 |
| 16 | 7.14E−10 | 1.99E−38 | 1.30E−34 | 9.13E−37 | 1.47E−21 |
| 17 | 6.27E−40 | 9.96E−18 | 4.98E−31 | 1.50E−43 | 1.65E−56 |
| 18 | 7.35E−05 | 4.57E−28 | 1.61E−25 | 2.68E−27 | 2.50E−15 |
| 19 | 1.16E−19 | 5.28E−36 | 2.83E−54 | 2.59E−42 | 9.74E−48 |
| 20 | 1.16E−19 | 5.28E−36 | 2.83E−54 | 2.59E−42 | 9.74E−48 |
| 21 | 6.44E−22 | 5.93E−45 | 3.28E−47 | 2.84E−54 | 2.84E−46 |
| 22 | 6.19E−20 | 1.49E−36 | 4.90E−54 | 5.19E−43 | 1.61E−47 |
| 23 | 4.80E−20 | 5.67E−36 | 2.19E−53 | 1.90E−42 | 7.35E−49 |
| 24 | 1.78E−19 | 5.67E−36 | 2.19E−53 | 1.90E−42 | 6.83E−48 |
| 25 | 1.71E−21 | 3.92E−44 | 2.20E−46 | 1.09E−52 | 8.26E−45 |
| 26 | 1.49E−20 | 1.39E−44 | 1.02E−46 | 1.38E−52 | 9.52E−46 |
| 27 | 9.23E−19 | 4.68E−44 | 1.13E−48 | 2.14E−52 | 7.18E−42 |
| 28 | 1.04E−18 | 2.43E−47 | 2.68E−42 | 8.73E−48 | 1.22E−43 |
| 29 | 1.81E−19 | 6.48E−47 | 5.36E−42 | 7.69E−49 | 5.28E−43 |
| 30 | 1.67E−04 | 1.19E−33 | 1.48E−27 | 1.33E−24 | 2.01E−19 |
| 31 | 2.71E−19 | 3.53E−46 | 2.81E−41 | 2.57E−47 | 3.11E−43 |
| 32 | 3.53E−20 | 6.26E−46 | 5.36E−42 | 7.69E−49 | 5.57E−44 |
| 33 | 4.08E−20 | 9.51E−46 | 1.44E−41 | 1.11E−48 | 8.48E−44 |
| 34 | 9.00E−16 | 3.30E−45 | 1.53E−41 | 3.99E−46 | 1.50E−39 |
| 35 | 4.69E−14 | 4.82E−45 | 1.45E−39 | 3.68E−47 | 5.85E−39 |
| 36 | 6.72E−15 | 8.68E−45 | 4.34E−42 | 8.00E−45 | 1.33E−38 |
| 37 | 6.72E−15 | 8.68E−45 | 4.34E−42 | 8.00E−45 | 1.33E−38 |
| 38 | 4.79E−19 | 4.19E−45 | 5.36E−42 | 3.42E−47 | 5.28E−43 |
| 39 | 1.94E−40 | 1.06E−10 | 6.27E−21 | 4.23E−35 | 2.60E−47 |
| 40 | 1.53E−15 | 3.13E−43 | 2.72E−42 | 3.02E−45 | 1.22E−39 |
| 41 | 9.94E−38 | 3.55E−16 | 4.46E−22 | 7.61E−44 | 1.24E−41 |
| 42 | 2.34E−02 | 4.47E−21 | 3.44E−16 | 3.10E−15 | 2.24E−09 |
| 43 | 2.39E−02 | 1.02E−20 | 4.32E−16 | 6.38E−15 | 3.86E−09 |
| 44 | 3.44E−22 | 5.51E−13 | 6.56E−18 | 4.39E−24 | 1.24E−45 |
| 45 | 1.36E−21 | 1.14E−24 | 2.38E−33 | 2.46E−45 | 1.53E−29 |
| 46 | 1.36E−19 | 4.39E−32 | 1.03E−35 | 9.03E−45 | 5.01E−44 |
| 47 | 1.18E−14 | 5.29E−30 | 3.76E−40 | 3.55E−44 | 5.56E−38 |
| 48 | 4.91E−17 | 8.23E−33 | 1.06E−40 | 6.11E−39 | 4.88E−43 |
| 49 | 1.35E−04 | 2.25E−22 | 1.78E−19 | 5.28E−22 | 2.63E−12 |
| 50 | 8.68E−26 | 1.45E−15 | 1.73E−22 | 6.68E−34 | 1.90E−42 |

TABLE 11g
Data for Klebsiella, particularly K. pneumoniae (continued)

| No. | Locus.Tag | Gene.Symbol | GenBank.Accession | Chromosome |
|---|---|---|---|---|
| 1 | SSON_3896 | aadA | YP_312670 | |
| 2 | SeHA_C1580 | blaT | YP_002045448 | |
| 3 | HMPREF9345_05066 | | ZP_07100147 | |
| 4 | KPN_pKPN5p08201 | | YP_001338811 | plasmid pKPN5 |
| 5 | Salmoentericaenterica_010100000245 | | ZP_02702077 | |
| 6 | KPN2242_07235 | | AEJ97365 | |
| 7 | KPN2242_00750 | | AEJ96075 | |
| 8 | HMPREF0484_1390 | mgtA | ZP_06014374 | |
| 9 | Kvar_3592 | | YP_003440504 | |
| 10 | KPK_A0103 | | YP_002235751 | plasmid pKP187 |
| 11 | HMPREF0484_1392 | pacL | ZP_06014376 | |
| 12 | HMPREF9534_04427 | | ZP_07188952 | |
| 13 | CKO_pCKO3p06155 | | YP_001456633 | plasmid pCKO3 |
| 14 | HMPREF0484_0044 | vmtV | ZP_06013029 | |
| 15 | HMPREF0484_2697 | | ZP_06015679 | |
| 16 | HMPREF0485_04762 | | ZP_06552358 | |
| 17 | EcolB_01004576 | | ZP_00708527 | |
| 18 | HMPREF0484_0046 | | ZP_06013031 | |
| 19 | HMPREF9538_00440 | | ZP_08302804 | |
| 20 | KPN_pKPN3p05893 | ptxE | YP_001338502 | plasmid pKPN3 |
| 21 | KPN2242_07425 | | AEJ97403 | |
| 22 | KPN_pKPN3p05890 | ptxB | YP_001338499 | plasmid pKPN3 |
| 23 | HMPREF9538_00443 | | ZP_08302807 | |
| 24 | KPN_pKPN3p05891 | ptxC | YP_001338500 | plasmid pKPN3 |
| 25 | HMPREF0484_2686 | | ZP_06015668 | |
| 26 | HMPREF0484_2687 | gpw | ZP_06015669 | |
| 27 | HMPREF0484_2684 | | ZP_06015666 | |
| 28 | ECL_04426 | | YP_003614904 | |
| 29 | KPN2242_07415 | | AEJ97401 | |
| 30 | HMPREF0485_03923 | | ZP_06551519 | |
| 31 | Salmonellentericaenterica_010100016432 | | ZP_03412648 | |
| 32 | HMPREF0484_2698 | | ZP_06015680 | |
| 33 | HMPREF0484_2694 | fii | ZP_06015676 | |
| 34 | KPN2242_07345 | | AEJ97387 | |
| 35 | KPN2242_07330 | | AEJ97384 | |
| 36 | KPN2242_07325 | | AEJ97383 | |
| 37 | HMPREF0484_2676 | | ZP_06015658 | |
| 38 | ECL_04434 | | YP_003614912 | |
| 39 | HMPREF9538_04737 | | ZP_08307036 | |
| 40 | HMPREF0484_2673 | | ZP_06015655 | |
| 41 | SeSA_B0079 | | YP_002112958 | plasmid |
| | | | | pCVM19633_110 |
| 42 | Kvar_2527 | | YP_003439449 | |
| 43 | Dd1591_2579 | | YP_003004893 | |
| 44 | ETAE_p041 | folP | YP_003297635 | plasmid pEIB202 |
| 45 | STMDT12_C39340 | | BAJ38877 | |
| 46 | SC026 | aph | YP_209331 | plasmid pSC138 |
| 47 | STMDT12_C39170 | | BAJ38860 | |
| 48 | HMPREF9538_01820 | | ZP_08304144 | |
| 49 | t1924 | exo | NP_805691 | |
| 50 | pK2044_00525 | | YP_001687935 | plasmid pK2044 |

TABLE 11h
Data for Klebsiella, particularly K. pneumoniae (continued)

| No. | Start.Coord | End.Coord | Strand | Scaffold.ID |
|---|---|---|---|---|
| 1 | 4110458 | 4111246 | − | 640427102 |
| 2 | 1525960 | 1526820 | + | 642555218 |
| 3 | 4715 | 5554 | − | 648294624 |
| 4 | 34908 | 35255 | − | 640753021 |
| 5 | 36757 | 37062 | + | 641778223 |
| 6 | 1535907 | 1536932 | − | 651053122 |
| 7 | 159235 | 160521 | − | 651053122 |
| 8 | 2865 | 3848 | − | 647009817 |
| 9 | 3765814 | 3768501 | − | 646312028 |
| 10 | 67987 | 70674 | + | 643348532 |
| 11 | 4691 | 5551 | − | 647009817 |
| 12 | 2120 | 2368 | + | 648289812 |
| 13 | 8632 | 8931 | + | 640753081 |
| 14 | 12911 | 13663 | + | 647009752 |
| 15 | 20402 | 22975 | + | 647009874 |
| 16 | 93128 | 94558 | + | 647536396 |
| 17 | 3555 | 4568 | + | 638359041 |
| 18 | 14573 | 15328 | + | 647009752 |
| 19 | 933 | 1943 | − | 651332959 |
| 20 | 38514 | 39383 | + | 640753019 |
| 21 | 1563447 | 1563746 | + | 651053122 |
| 22 | 35802 | 36665 | + | 640753019 |
| 23 | 3648 | 4475 | − | 651332959 |
| 24 | 36662 | 37501 | + | 640753019 |
| 25 | 11204 | 11776 | + | 647009874 |
| 26 | 11773 | 12132 | + | 647009874 |
| 27 | 10265 | 10696 | + | 647009874 |
| 28 | 4537618 | 4539336 | + | 646564624 |
| 29 | 1561697 | 1562869 | + | 651053122 |
| 30 | 51251 | 51370 | − | 647536393 |
| 31 | 154 | 357 | − | 643042634 |
| 32 | 23022 | 23267 | + | 647009874 |
| 33 | 19408 | 19923 | + | 647009874 |
| 34 | 1552497 | 1552712 | + | 651053122 |
| 35 | 1551079 | 1551729 | + | 651053122 |
| 36 | 1550023 | 1551075 | + | 651053122 |
| 37 | 6165 | 7229 | + | 647009874 |
| 38 | 4543715 | 4546123 | − | 646564624 |
| 39 | 1555 | 2055 | − | 651333542 |
| 40 | 2380 | 3411 | − | 647009874 |
| 41 | 68933 | 70240 | + | 642555219 |
| 42 | 2637299 | 2637790 | + | 646312028 |
| 43 | 2932956 | 2933891 | + | 644736389 |
| 44 | 32101 | 32916 | − | 646311959 |
| 45 | 4084530 | 4085237 | − | 651053007 |
| 46 | 21137 | 21952 | − | 637000354 |
| 47 | 4067283 | 4067942 | + | 651053007 |
| 48 | 2070 | 2927 | − | 651333149 |
| 49 | 1967759 | 1968439 | + | 637000205 |
| 50 | 78317 | 81286 | − | 646564501 |

TABLE 12a
Data for Klebsiella, particularly K. pneumoniae

| | Scaffold.External. | | |
|---|---|---|---|
| No. | Accession | Scaffold.Name | best_pv |
| 1 | NC_007384 | Shigella sonnei Ss046: NC_007384 | 1.21395823682916e−119 |
| 2 | NC_011083 | Salmonella enterica subsp. enterica serovar Heidelberg str. SL476: | 1.70517984237646e−115 |
| | | NC_011083 | |
| 3 | NZ_ADWV01000045 | Escherichia coli MS 107-1 E_coliMS107-1-1.0.1_Cont44.1: | 3.12333368944279e−110 |
| | | NZ_ADWV01000045 | |
| 4 | NC_009651 | Klebsiella pneumoniae subsp. pneumoniae MGH 78578 plasmid pKPN5: | 1.8490215255217e−103 |
| | | NC_009651 | |
| 5 | NZ_ABFH01000001 | Salmonella enterica subsp. enterica serovar Virchow str. SL491, | 4.16211077482132e−97 |
| | | unfinished sequence: NZ_ABFH01000001 | |
| 6 | CP002910 | Klebsiella pneumoniae KCTC 2242: CP002910 | 1.34397014479151e−80 |
| 7 | CP002910 | Klebsiella pneumoniae KCTC 2242: CP002910 | 1.21342816034335e−71 |
| 8 | NZ_ACZD01000070 | Klebsiella pneumoniae subsp. rhinoscleromatis ATCC 13884 | 4.42089689687353e−61 |
| | | contig00070: NZ_ACZD01000070 | |
| 9 | NC_013850 | Klebsiella variicola At-22 chromosome: NC_013850 | 8.41004168548543e−61 |
| 10 | NC_011282 | Klebsiella pneumoniae 342 plasmid pKP187: NC_011282 | 8.41004168548543e−61 |
| 11 | NZ_ACZD01000070 | Klebsiella pneumoniae subsp. rhinoscleromatis ATCC 13884 | 8.41004168548543e−61 |
| | | contig00070: NZ_ACZD01000070 | |
| 12 | NZ_ADTP01000323 | Escherichia coli MS 69-1 E_coli69-1-1.0_Cont630.1: NZ_ADTP01000323 | 4.94539115664213e−60 |
| 13 | NC_009793 | Citrobacter koseri ATCC BAA-895 plasmid pCKO3: NC_009793 | 5.71878021049123e−59 |
| 14 | NZ_ACZD01000005 | Klebsiella pneumoniae subsp. rhinoscleromatis ATCC 13884 | 1.22977045856913e−58 |
| | | contig00005: NZ_ACZD01000005 | |
| 15 | NZ_ACZD01000127 | Klebsiella pneumoniae subsp. rhinoscleromatis ATCC 13884 | 1.49068550300511e−58 |
| | | contig00129: NZ_ACZD01000127 | |
| 16 | NZ_GG745515 | Klebsiella sp. 1_1_55 genomic scaffold supercont1.8: NZ_GG745515 | 7.09566707309011e−58 |
| 17 | NZ_AAJX01000089 | Escherichia coli B171, unfinished sequence: NZ_AAJX01000089 | 1.65409147045657e−56 |
| 18 | NZ_ACZD01000005 | Klebsiella pneumoniae subsp. rhinoscleromatis ATCC 13884 | 7.54090407593199e−55 |
| | | contig00005: NZ_ACZD01000005 | |
| 19 | NZ_AFBO01000042 | Klebsiella sp. MS 92-3 K_spMS92-3-l.0_Cont91.1: NZ_AFBO01000042 | 2.8348333685311e−54 |
| 20 | NC_009649 | Klebsiella pneumoniae subsp. pneumoniae MGH 78578 plasmid pKPN3: | 2.8348333685311e−54 |
| | | NC_009649 | |
| 21 | CP002910 | Klebsiella pneumoniae KCTC 2242: CP002910 | 2.83530891190408e−54 |
| 22 | NC_009649 | Klebsiella pneumoniae subsp. pneumoniae MGH 78578 plasmid pKPN3: | 4.89541334527925e−54 |
| | | NC_009649 | |
| 23 | NZ_AFBO01000042 | Klebsiella sp. MS 92-3 K_spMS92-3-l.0_Cont91.1: NZ_AFBO01000042 | 2.18592863711471e−53 |
| 24 | NC_009649 | Klebsiella pneumoniae subsp. pneumoniae MGH 78578 plasmid pKPN3: | 2.18592863711471e−53 |
| | | NC_009649 | |
| 25 | NZ_ACZD01000127 | Klebsiella pneumoniae subsp. rhinoscleromatis ATCC 13884 | 1.08576020331202e−52 |
| | | contig00129: NZ_ACZD01000127 | |
| 26 | NZ_ACZD01000127 | Klebsiella pneumoniae subsp. rhinoscleromatis ATCC 13884 | 1.37521017661703e−52 |
| | | contig00129: NZ_ACZD01000127 | |
| 27 | NZ_ACZD01000127 | Klebsiella pneumoniae subsp. rhinoscleromatis ATCC 13884 | 2.1362800317976e−52 |
| | | contig00129: NZ_ACZD01000127 | |
| 28 | NC_014121 | Enterobacter cloacae subsp. cloacae ATCC 13047 chromosome: | 2.21381524453565e−51 |
| | | NC_014121 | |
| 29 | CP002910 | Klebsiella pneumoniae KCTC 2242: CP002910 | 6.53846908249994e−51 |
| 30 | NZ_GG745512 | Klebsiella sp. 1_1_55 genomic scaffold supercont1.5: NZ_GG745512 | 2.78992804201171e−50 |
| 31 | NZ_CAAZ01000154 | Salmonella enterica subsp. enterica serovar Typhi str. E98-3139, | 4.10919139010377e−50 |
| | | unfinished sequence: NZ_CAAZ01000154 | |
| 32 | NZ_ACZD01000127 | Klebsiella pneumoniae subsp. rhinoscleromatis ATCC 13884 | 6.10670380866266e−50 |
| | | contig00129: NZ_ACZD01000127 | |
| 33 | NZ_ACZD01000127 | Klebsiella pneumoniae subsp. rhinoscleromatis ATCC 13884 | 1.00996840886331e−49 |
| | | contig00129: NZ_ACZD01000127 | |
| 34 | CP002910 | Klebsiella pneumoniae KCTC 2242: CP002910 | 1.33344542353295e−48 |
| 35 | CP002910 | Klebsiella pneumoniae KCTC 2242: CP002910 | 3.00269800428115e−48 |
| 36 | CP002910 | Klebsiella pneumoniae KCTC 2242: CP002910 | 3.13126971411145e−48 |
| 37 | NZ_ACZD01000127 | Klebsiella pneumoniae subsp. rhinoscleromatis ATCC 13884 | 3.13126971411145e−48 |
| | | contig00129: NZ_ACZD01000127 | |
| 38 | NC_014121 | Enterobacter cloacae subsp. cloacae ATCC 13047 chromosome: | 3.79149056816214e−48 |
| | | NC_014121 | |
| 39 | NZ_AFBO01000625 | Klebsiella sp. MS 92-3 K_spMS92-3-1.0_Cont1175.2: NZ_AFBO01000625 | 2.5975548233422e−47 |
| 40 | NZ_ACZD01000127 | Klebsiella pneumoniae subsp. rhinoscleromatis ATCC 13884 | 1.05391699509183e−46 |
| | | contig00129: NZ_ACZD01000127 | |
| 41 | NC_011092 | Salmonella enterica subsp. enterica serovar Schwarzengrund str. | 4.42178242563847e−46 |
| | | CVM19633 plasmid pCVM19633_110: NC_011092 | |
| 42 | NC_013850 | Klebsiella variicola At-22 chromosome: NC_013850 | 6.65483065085068e−46 |
| 43 | NC_012912 | Dickeya zeae Ech1591: NC_012912 | 1.05262166415392e−45 |
| 44 | NC_013509 | Edwardsiella tarda EIB202 plasmid pEIB202: NC_013509 | 1.24074600175825e−45 |
| 45 | AP011957 | Salmonella enterica subsp. enterica serovar Typhimurium str. | 2.46270503642371e−45 |
| | | T000240 DNA: AP011957 | |
| 46 | NC_006856 | Salmonella enterica subsp. enterica serovar Choleraesuis str. SC- | 9.02631418377704e−45 |
| | | B67 plasmid pSC138: NC_006856 | |
| 47 | AP011957 | Salmonella enterica subsp. enterica serovar Typhimurium str. | 3.37821430101762e−44 |
| | | T000240 DNA: AP011957 | |
| 48 | NZ_AFBO01000232 | Klebsiella sp. MS 92-3 K_spMS92-3-1.0_Cont505.1: NZ_AFBO01000232 | 4.87973844618098e−43 |
| 49 | NC_004631 | Salmonella enterica subsp. enterica serovar Typhi Ty2: NC_004631 | 1.54269244019591e−42 |
| 50 | NC_006625 | Klebsiella pneumoniae NTUH-K2044 plasmid pK2044: NC_006625 | 1.89874529968327e−42 |

TABLE 12b
Data for Klebsiella, particularly K. pneumoniae (continued)

| No. | sign_phenos | sign_phenos_class | best_pheno | best_pheno_class |
|---|---|---|---|---|
| 1 | A/S; AUG; AZT; CAX; CAZ; CFT; CP; CPE; | aminoglycoside; fluoroquinolone; lactam; other | TO | aminoglycoside |
| | CRM; ETP; GM; LVX; P/T; TO; T/S | | | |
| 2 | A/S; AUG; AZT; CAX; CAZ; CFT; CP; CPE; | aminoglycoside; fluoroquinolone; lactam; other | AUG | lactam |
| | CRM; ETP; GM; LVX; P/T; TO; T/S | | | |
| 3 | A/S; AUG; AZT; CAX; CAZ; CFT; CP; CPE; | aminoglycoside; fluoroquinolone; lactam; other | T/S | other |
| | CRM; ETP; GM; LVX; P/T; TO; T/S | | | |
| 4 | A/S; AUG; AZT; CAX; CAZ; CFT; CP; CPE; | aminoglycoside; fluoroquinolone; lactam; other | T/S | other |
| | CRM; ETP; GM; LVX; P/T; TO; T/S | | | |
| 5 | A/S; AUG; AZT; CAX; CAZ; CFT; CP; CPE; | aminoglycoside; fluoroquinolone; lactam; other | T/S | other |
| | CRM; ETP; GM; LVX; P/T; TO; T/S | | | |
| 6 | A/S; AUG; AZT; CAX; CAZ; CFT; CP; CPE; | aminoglycoside; fluoroquinolone; lactam; other | ETP | lactam |
| | CRM; ETP; GM; LVX; P/T; TO; T/S | | | |
| 7 | A/S; AUG; AZT; CAX; CAZ; CFT; CP; CPE; | aminoglycoside; fluoroquinolone; lactam; other | ETP | lactam |
| | CRM; ETP; GM; LVX; P/T; TO; T/S | | | |
| 8 | A/S; AUG; AZT; CAX; CAZ; CFT; CP; CPE; | aminoglycoside; fluoroquinolone; lactam; other | ETP | lactam |
| | CRM; ETP; GM; LVX; P/T; TO; T/S | | | |
| 9 | A/S; AUG; AZT; CAX; CAZ; CFT; CP; CPE; | aminoglycoside; fluoroquinolone; lactam; other | ETP | lactam |
| | CRM; ETP; GM; LVX; P/T; TO; T/S | | | |
| 10 | A/S; AUG; AZT; CAX; CAZ; CFT; CP; CPE; | aminoglycoside; fluoroquinolone; lactam; other | ETP | lactam |
| | CRM; ETP; GM; LVX; P/T; TO; T/S | | | |
| 11 | A/S; AUG; AZT; CAX; CAZ; CFT; CP; CPE; | aminoglycoside; fluoroquinolone; lactam; other | ETP | lactam |
| | CRM; ETP; GM; LVX; P/T; TO; T/S | | | |
| 12 | A/S; AUG; AZT; CAX; CAZ; CFT; CP; CPE; | aminoglycoside; fluoroquinolone; lactam; other | CAZ | lactam |
| | CRM; ETP; GM; LVX; P/T; TO; T/S | | | |
| 13 | A/S; AUG; AZT; CAX; CAZ; CFT; CP; CPE; | aminoglycoside; fluoroquinolone; lactam; other | AUG | lactam |
| | CRM; ETP; GM; LVX; P/T; TO; T/S | | | |
| 14 | A/S; AUG; AZT; CAX; CAZ; CFT; CP; CPE; | aminoglycoside; fluoroquinolone; lactam; other | ETP | lactam |
| | CRM; ETP; GM; LVX; P/T; TO; T/S | | | |
| 15 | A/S; AUG; AZT; CAX; CAZ; CFT; CP; CPE; | aminoglycoside; fluoroquinolone; lactam; other | TO | aminoglycoside |
| | CRM; ETP; GM; LVX; P/T; TO; T/S | | | |
| 16 | A/S; AUG; AZT; CAX; CAZ; CFT; CP; CPE; | aminoglycoside; fluoroquinolone; lactam; other | ETP | lactam |
| | CRM; ETP; GM; LVX; P/T; TO; T/S | | | |
| 17 | A/S; AUG; AZT; CAX; CAZ; CFT; CP; CPE; | aminoglycoside; fluoroquinolone; lactam; other | T/S | other |
| | CRM; ETP; GM; LVX; P/T; TO; T/S | | | |
| 18 | A/S; AUG; AZT; CAX; CAZ; CFT; CP; CPE; | aminoglycoside; fluoroquinolone; lactam; other | ETP | lactam |
| | CRM; ETP; GM; LVX; P/T; TO; T/S | | | |
| 19 | A/S; AUG; AZT; CAX; CAZ; CFT; CP; CPE; | aminoglycoside; fluoroquinolone; lactam; other | P/T | lactam |
| | CRM; ETP; GM; LVX; P/T; TO; T/S | | | |
| 20 | A/S; AUG; AZT; CAX; CAZ; CFT; CP; CPE; | aminoglycoside; fluoroquinolone; lactam; other | P/T | lactam |
| | CRM; ETP; GM; LVX; P/T; TO; T/S | | | |
| 21 | A/S; AUG; AZT; CAX; CAZ; CFT; CP; CPE; | aminoglycoside; fluoroquinolone; lactam; other | TO | aminoglycoside |
| | CRM; ETP; GM; LVX; P/T; TO; T/S | | | |
| 22 | A/S; AUG; AZT; CAX; CAZ; CFT; CP; CPE; | aminoglycoside; fluoroquinolone; lactam; other | P/T | lactam |
| | CRM; ETP; GM; LVX; P/T; TO; T/S | | | |
| 23 | A/S; AUG; AZT; CAX; CAZ; CFT; CP; CPE; | aminoglycoside; fluoroquinolone; lactam; other | P/T | lactam |
| | CRM; ETP; GM; LVX; P/T; TO; T/S | | | |
| 24 | A/S; AUG; AZT; CAX; CAZ; CFT; CP; CPE; | aminoglycoside; fluoroquinolone; lactam; other | P/T | lactam |
| | CRM; ETP; GM; LVX; P/T; TO; T/S | | | |
| 25 | A/S; AUG; AZT; CAX; CAZ; CFT; CP; CPE; | aminoglycoside; fluoroquinolone; lactam; other | TO | aminoglycoside |
| | CRM; ETP; GM; LVX; P/T; TO; T/S | | | |
| 26 | A/S; AUG; AZT; CAX; CAZ; CFT; CP; CPE; | aminoglycoside; fluoroquinolone; lactam; other | TO | aminoglycoside |
| | CRM; ETP; GM; LVX; P/T; TO; T/S | | | |
| 27 | A/S; AUG; AZT; CAX; CAZ; CFT; CP; CPE; | aminoglycoside; fluoroquinolone; lactam; other | TO | aminoglycoside |
| | CRM; ETP; GM; LVX; P/T; TO; T/S | | | |
| 28 | A/S; AUG; AZT; CAX; CAZ; CFT; CP; CPE; | aminoglycoside; fluoroquinolone; lactam; other | CP | fluoroquinolone |
| | CRM; ETP; GM; LVX; P/T; TO; T/S | | | |
| 29 | A/S; AUG; AZT; CAX; CAZ; CFT; CP; CPE; | aminoglycoside; fluoroquinolone; lactam; other | CP | fluoroquinolone |
| | CRM; ETP; GM; LVX; P/T; TO; T/S | | | |
| 30 | A/S; AUG; AZT; CAX; CAZ; CFT; CP; CPE; | aminoglycoside; fluoroquinolone; lactam; other | ETP | lactam |
| | CRM; ETP; GM; LVX; P/T; TO; T/S | | | |
| 31 | A/S; AUG; AZT; CAX; CAZ; CFT; CP; CPE; | aminoglycoside; fluoroquinolone; lactam; other | CP | fluoroquinolone |
| | CRM; ETP; GM; LVX; P/T; TO; T/S | | | |
| 32 | A/S; AUG; AZT; CAX; CAZ; CFT; CP; CPE; | aminoglycoside; fluoroquinolone; lactam; other | CP | fluoroquinolone |
| | CRM; ETP; GM; LVX; P/T; TO; T/S | | | |
| 33 | A/S; AUG; AZT; CAX; CAZ; CFT; CP; CPE; | aminoglycoside; fluoroquinolone; lactam; other | CP | fluoroquinolone |
| | CRM; ETP; GM; LVX; P/T; TO; T/S | | | |
| 34 | A/S; AUG; AZT; CAX; CAZ; CFT; CP; CPE; | aminoglycoside; fluoroquinolone; lactam; other | CP | fluoroquinolone |
| | CRM; ETP; GM; LVX; P/T; TO; T/S | | | |
| 35 | A/S; AUG; AZT; CAX; CAZ; CFT; CP; CPE; | aminoglycoside; fluoroquinolone; lactam; other | CP | fluoroquinolone |
| | CRM; ETP; GM; LVX; P/T; TO; T/S | | | |
| 36 | A/S; AUG; AZT; CAX; CAZ; CFT; CP; CPE; | aminoglycoside; fluoroquinolone; lactam; other | CP | fluoroquinolone |
| | CRM; ETP; GM; LVX; P/T; TO; T/S | | | |
| 37 | A/S; AUG; AZT; CAX; CAZ; CFT; CP; CPE; | aminoglycoside; fluoroquinolone; lactam; other | CP | fluoroquinolone |
| | CRM; ETP; GM; LVX; P/T; TO; T/S | | | |
| 38 | A/S; AUG; AZT; CAX; CAZ; CFT; CP; CPE; | aminoglycoside; fluoroquinolone; lactam; other | CP | fluoroquinolone |
| | CRM; ETP; GM; LVX; P/T; TO; T/S | | | |
| 39 | A/S; AUG; AZT; CAX; CAZ; CFT; CP; CPE; | aminoglycoside; fluoroquinolone; lactam; other | T/S | other |
| | CRM; GM; LVX; P/T; TO; T/S | | | |
| 40 | A/S; AUG; AZT; CAX; CAZ; CFT; CP; CPE; | aminoglycoside; fluoroquinolone; lactam; other | CP | fluoroquinolone |
| | CRM; ETP; GM; LVX; P/T; TO; T/S | | | |
| 41 | A/S; AUG; AZT; CAX; CAZ; CFT; CP; CPE; | aminoglycoside; fluoroquinolone; lactam; other | AUG | lactam |
| | CRM; ETP; GM; LVX; P/T; TO; T/S | | | |
| 42 | AUG; AZT; CAX; CAZ; CFT; CP; CPE; CRM; | aminoglycoside; fluoroquinolone; lactam; other | ETP | lactam |
| | ETP; LVX; P/T; TO; T/S | | | |
| 43 | AUG; AZT; CAX; CAZ; CFT; CP; CPE; CRM; | aminoglycoside; fluoroquinolone; lactam; other | ETP | lactam |
| | ETP; LVX; P/T; TO; T/S | | | |
| 44 | A/S; AUG; AZT; CAX; CAZ; CFT; CP; CPE; | aminoglycoside; fluoroquinolone; lactam; other | T/S | other |
| | CRM; ETP; GM; LVX; P/T; TO; T/S | | | |
| 45 | A/S; AUG; AZT; CAX; CAZ; CFT; CP; CPE; | aminoglycoside; fluoroquinolone; lactam; other | TO | aminoglycoside |
| | CRM; ETP; GM; LVX; P/T; TO; T/S | | | |
| 46 | A/S; AUG; AZT; CAX; CAZ; CFT; CP; CPE; | aminoglycoside; fluoroquinolone; lactam; other | TO | aminoglycoside |
| | CRM; ETP; GM; LVX; P/T; TO; T/S | | | |
| 47 | A/S; AUG; AZT; CAX; CAZ; CFT; CP; CPE; | aminoglycoside; fluoroquinolone; lactam; other | AUG | lactam |
| | CRM; ETP; GM; LVX; P/T; TO; T/S | | | |
| 48 | A/S; AUG; AZT; CAX; CAZ; CFT; CP; CPE; | aminoglycoside; fluoroquinolone; lactam; other | T/S | other |
| | CRM; ETP; GM; LVX; P/T; TO; T/S | | | |
| 49 | A/S; AUG; AZT; CAX; CAZ; CFT; CP; CPE; | aminoglycoside; fluoroquinolone; lactam; other | ETP | lactam |
| | CRM; ETP; GM; LVX; P/T; TO; T/S | | | |
| 50 | A/S; AUG; AZT; CAX; CAZ; CFT; CP; CPE; | aminoglycoside; fluoroquinolone; lactam; other | T/S | other |
| | CRM; ETP; GM; LVX; P/T; TO; T/S | | | |

TABLE 12c
Data for Klebsiella, particularly K. pneumoniae (continued)

| No. | num_aminoglycoside | num_fluoroquinolone | num_lactam | num_other |
|---|---|---|---|---|
| 1 | 2 | 2 | 10 | 1 |
| 2 | 2 | 2 | 10 | 1 |
| 3 | 2 | 2 | 10 | 1 |
| 4 | 2 | 2 | 10 | 1 |
| 5 | 2 | 2 | 10 | 1 |
| 6 | 2 | 2 | 10 | 1 |
| 7 | 2 | 2 | 10 | 1 |
| 8 | 2 | 2 | 10 | 1 |
| 9 | 2 | 2 | 10 | 1 |
| 10 | 2 | 2 | 10 | 1 |
| 11 | 2 | 2 | 10 | 1 |
| 12 | 2 | 2 | 10 | 1 |
| 13 | 2 | 2 | 10 | 1 |
| 14 | 2 | 2 | 10 | 1 |
| 15 | 2 | 2 | 10 | 1 |
| 16 | 2 | 2 | 10 | 1 |
| 17 | 2 | 2 | 10 | 1 |
| 18 | 2 | 2 | 10 | 1 |
| 19 | 2 | 2 | 10 | 1 |
| 20 | 2 | 2 | 10 | 1 |
| 21 | 2 | 2 | 10 | 1 |
| 22 | 2 | 2 | 10 | 1 |
| 23 | 2 | 2 | 10 | 1 |
| 24 | 2 | 2 | 10 | 1 |
| 25 | 2 | 2 | 10 | 1 |
| 26 | 2 | 2 | 10 | 1 |
| 27 | 2 | 2 | 10 | 1 |
| 28 | 2 | 2 | 10 | 1 |
| 29 | 2 | 2 | 10 | 1 |
| 30 | 2 | 2 | 10 | 1 |
| 31 | 2 | 2 | 10 | 1 |
| 32 | 2 | 2 | 10 | 1 |
| 33 | 2 | 2 | 10 | 1 |
| 34 | 2 | 2 | 10 | 1 |
| 35 | 2 | 2 | 10 | 1 |
| 36 | 2 | 2 | 10 | 1 |
| 37 | 2 | 2 | 10 | 1 |
| 38 | 2 | 2 | 10 | 1 |
| 39 | 2 | 2 | 9 | 1 |
| 40 | 2 | 2 | 10 | 1 |
| 41 | 2 | 2 | 10 | 1 |
| 42 | 1 | 2 | 9 | 1 |
| 43 | 1 | 2 | 9 | 1 |
| 44 | 2 | 2 | 10 | 1 |
| 45 | 2 | 2 | 10 | 1 |
| 46 | 2 | 2 | 10 | 1 |
| 47 | 2 | 2 | 10 | 1 |
| 48 | 2 | 2 | 10 | 1 |
| 49 | 2 | 2 | 10 | 1 |
| 50 | 2 | 2 | 10 | 1 |

TABLE 12d
Data for Klebsiella, particularly K. pneumoniae (continued)

| No. | A/S_pv_adj | AUG_pv_adj | AZT_pv_adj | CAX_pv_adj | CAZ_pv_adj |
|---|---|---|---|---|---|
| 1 | 1.28E−76 | 1.24E−105 | 4.06E−95 | 3.39E−95 | 5.99E−93 |
| 2 | 1.18E−98 | 1.71E−115 | 9.09E−91 | 6.55E−88 | 1.66E−96 |
| 3 | 1.08E−81 | 5.85E−86 | 2.76E−94 | 4.16E−97 | 6.84E−100 |
| 4 | 5.55E−76 | 3.05E−84 | 1.38E−91 | 2.64E−96 | 5.33E−94 |
| 5 | 1.22E−70 | 3.41E−71 | 1.41E−80 | 1.50E−83 | 6.22E−90 |
| 6 | 7.70E−21 | 1.03E−41 | 8.20E−48 | 2.50E−44 | 2.69E−46 |
| 7 | 8.54E−16 | 4.34E−29 | 4.54E−38 | 5.50E−34 | 1.34E−34 |
| 8 | 2.62E−12 | 1.74E−24 | 1.49E−26 | 2.74E−25 | 2.84E−24 |
| 9 | 5.20E−12 | 2.50E−24 | 3.69E−26 | 7.31E−25 | 7.66E−24 |
| 10 | 5.20E−12 | 2.50E−24 | 3.69E−26 | 7.31E−25 | 7.66E−24 |
| 11 | 5.20E−12 | 2.50E−24 | 3.69E−26 | 7.31E−25 | 7.66E−24 |
| 12 | 3.32E−43 | 1.75E−59 | 1.48E−54 | 9.28E−55 | 4.95E−60 |
| 13 | 2.41E−43 | 5.72E−59 | 4.20E−53 | 2.96E−53 | 2.14E−58 |
| 14 | 2.47E−16 | 8.57E−27 | 1.49E−34 | 1.96E−31 | 8.83E−33 |
| 15 | 1.72E−35 | 6.40E−55 | 1.25E−44 | 4.12E−43 | 1.61E−46 |
| 16 | 3.04E−18 | 5.19E−32 | 4.83E−36 | 2.23E−35 | 1.91E−32 |
| 17 | 1.02E−47 | 9.19E−45 | 1.85E−48 | 9.17E−53 | 6.18E−56 |
| 18 | 3.51E−17 | 3.04E−23 | 8.29E−30 | 1.21E−27 | 9.29E−29 |
| 19 | 1.03E−40 | 7.90E−52 | 1.41E−37 | 4.81E−39 | 9.97E−38 |
| 20 | 1.03E−40 | 7.90E−52 | 1.41E−37 | 4.81E−39 | 9.97E−38 |
| 21 | 8.56E−34 | 4.84E−53 | 8.75E−43 | 2.41E−41 | 9.43E−45 |
| 22 | 5.13E−42 | 1.10E−52 | 3.02E−38 | 9.55E−40 | 3.15E−38 |
| 23 | 1.11E−41 | 3.84E−52 | 1.00E−37 | 3.11E−39 | 8.03E−38 |
| 24 | 1.11E−41 | 3.84E−52 | 1.00E−37 | 3.11E−39 | 8.03E−38 |
| 25 | 8.85E−33 | 1.54E−51 | 2.83E−42 | 1.24E−40 | 2.88E−44 |
| 26 | 1.96E−32 | 2.54E−52 | 2.98E−42 | 1.41E−40 | 3.55E−44 |
| 27 | 5.12E−32 | 6.70E−50 | 1.84E−40 | 2.34E−38 | 1.33E−42 |
| 28 | 1.65E−30 | 3.00E−47 | 1.96E−38 | 1.37E−36 | 4.94E−39 |
| 29 | 4.43E−31 | 1.45E−47 | 2.29E−39 | 1.06E−37 | 3.63E−40 |
| 30 | 6.99E−12 | 2.37E−26 | 2.77E−24 | 5.28E−24 | 2.55E−26 |
| 31 | 2.78E−31 | 7.62E−46 | 1.11E−38 | 5.40E−37 | 1.95E−39 |
| 32 | 9.62E−32 | 1.45E−47 | 2.29E−39 | 1.06E−37 | 3.63E−40 |
| 33 | 2.27E−31 | 2.28E−47 | 3.20E−39 | 1.66E−37 | 5.77E−40 |
| 34 | 9.74E−28 | 9.40E−43 | 1.44E−35 | 7.30E−34 | 3.24E−36 |
| 35 | 1.57E−28 | 2.77E−42 | 6.21E−36 | 1.59E−34 | 2.14E−36 |
| 36 | 3.41E−27 | 2.34E−43 | 7.21E−36 | 4.53E−33 | 9.07E−37 |
| 37 | 3.41E−27 | 2.34E−43 | 7.21E−36 | 4.53E−33 | 9.07E−37 |
| 38 | 2.00E−30 | 7.61E−47 | 1.00E−38 | 1.06E−37 | 3.63E−40 |
| 39 | 8.29E−47 | 2.48E−33 | 3.67E−37 | 5.57E−42 | 2.74E−43 |
| 40 | 1.53E−27 | 6.97E−43 | 2.91E−36 | 2.70E−35 | 5.96E−38 |
| 41 | 1.75E−44 | 4.42E−46 | 2.16E−37 | 1.21E−36 | 1.12E−42 |
| 42 | 4.51E−02 | 4.66E−12 | 9.77E−17 | 3.13E−16 | 9.90E−15 |
| 43 | 5.37E−02 | 5.73E−12 | 1.27E−16 | 6.11E−16 | 1.15E−14 |
| 44 | 6.65E−31 | 4.17E−32 | 1.40E−25 | 3.69E−27 | 1.78E−29 |
| 45 | 6.15E−34 | 5.78E−41 | 2.29E−36 | 9.94E−38 | 1.48E−38 |
| 46 | 3.01E−32 | 3.12E−38 | 7.22E−37 | 3.96E−36 | 6.00E−37 |
| 47 | 4.35E−41 | 3.38E−44 | 1.49E−30 | 1.42E−33 | 1.82E−29 |
| 48 | 6.41E−31 | 1.63E−41 | 3.24E−33 | 2.26E−36 | 1.97E−31 |
| 49 | 2.54E−11 | 2.61E−18 | 8.71E−21 | 1.23E−18 | 1.87E−19 |
| 50 | 2.38E−23 | 3.76E−29 | 2.21E−27 | 4.97E−29 | 1.37E−29 |

TABLE 12e
Data for Klebsiella, particularly K. pneumoniae (continued)

| No. | CFT_pv_adj | CP_pv_adj | CPE_pv_adj | CRM_pv_adj | ETP_pv_adj |
|---|---|---|---|---|---|
| 1 | 2.17E−99 | 2.40E−85 | 2.31E−68 | 1.21E−82 | 1.87E−58 |
| 2 | 2.52E−83 | 1.28E−61 | 4.61E−66 | 7.83E−57 | 8.20E−51 |
| 3 | 3.93E−93 | 2.17E−58 | 2.89E−43 | 3.32E−73 | 3.54E−24 |
| 4 | 1.52E−90 | 4.25E−60 | 1.75E−43 | 2.59E−71 | 1.63E−23 |
| 5 | 3.61E−77 | 1.76E−47 | 1.47E−36 | 5.14E−62 | 6.31E−21 |
| 6 | 2.84E−46 | 1.53E−54 | 2.89E−63 | 1.06E−36 | 1.34E−80 |
| 7 | 8.43E−36 | 1.96E−43 | 3.06E−55 | 3.95E−29 | 1.21E−71 |
| 8 | 5.55E−27 | 2.63E−33 | 6.90E−40 | 1.01E−20 | 4.42E−61 |
| 9 | 1.58E−26 | 5.49E−33 | 1.32E−39 | 2.40E−20 | 8.41E−61 |
| 10 | 1.58E−26 | 5.49E−33 | 1.32E−39 | 2.40E−20 | 8.41E−61 |
| 11 | 1.58E−26 | 5.49E−33 | 1.32E−39 | 4.98E−21 | 8.41E−61 |
| 12 | 4.39E−54 | 4.96E−60 | 1.80E−51 | 7.75E−50 | 7.02E−53 |
| 13 | 1.26E−52 | 1.35E−58 | 1.72E−50 | 4.57E−49 | 3.71E−52 |
| 14 | 1.28E−31 | 2.00E−30 | 6.27E−42 | 1.20E−29 | 1.23E−58 |
| 15 | 2.05E−41 | 2.56E−52 | 7.76E−46 | 3.74E−32 | 5.20E−48 |
| 16 | 1.52E−36 | 2.10E−37 | 5.58E−48 | 5.62E−28 | 7.10E−58 |
| 17 | 9.26E−49 | 4.16E−22 | 1.22E−19 | 9.42E−36 | 5.55E−05 |
| 18 | 6.27E−28 | 1.02E−25 | 4.83E−36 | 7.62E−29 | 7.54E−55 |
| 19 | 9.92E−40 | 2.65E−39 | 2.28E−41 | 4.71E−28 | 1.10E−32 |
| 20 | 9.92E−40 | 2.65E−39 | 2.28E−41 | 4.71E−28 | 1.10E−32 |
| 21 | 1.47E−40 | 1.18E−49 | 1.74E−45 | 2.18E−32 | 1.46E−46 |
| 22 | 2.00E−40 | 6.22E−40 | 7.04E−42 | 1.08E−28 | 5.10E−33 |
| 23 | 6.77E−40 | 2.32E−39 | 3.78E−41 | 2.22E−28 | 3.70E−32 |
| 24 | 6.77E−40 | 2.32E−39 | 3.78E−41 | 2.22E−28 | 3.70E−32 |
| 25 | 4.69E−40 | 3.62E−49 | 1.06E−44 | 1.70E−33 | 2.11E−45 |
| 26 | 4.89E−40 | 1.97E−49 | 1.88E−45 | 2.34E−32 | 8.59E−46 |
| 27 | 5.94E−39 | 1.13E−47 | 2.46E−43 | 3.44E−33 | 1.93E−49 |
| 28 | 3.32E−36 | 2.21E−51 | 1.87E−44 | 1.56E−31 | 1.83E−41 |
| 29 | 2.69E−37 | 6.54E−51 | 4.48E−44 | 2.19E−30 | 3.44E−41 |
| 30 | 1.39E−24 | 6.75E−31 | 1.12E−35 | 5.11E−15 | 2.79E−50 |
| 31 | 1.34E−36 | 4.11E−50 | 1.67E−43 | 1.45E−31 | 8.85E−41 |
| 32 | 2.69E−37 | 6.11E−50 | 4.48E−44 | 2.19E−30 | 3.44E−41 |
| 33 | 6.74E−37 | 1.01E−49 | 6.91E−44 | 1.07E−30 | 4.69E−41 |
| 34 | 3.28E−34 | 1.33E−48 | 1.41E−40 | 1.52E−30 | 7.40E−43 |
| 35 | 3.72E−36 | 3.00E−48 | 1.67E−40 | 8.05E−31 | 2.56E−43 |
| 36 | 1.04E−34 | 3.13E−48 | 5.88E−41 | 1.06E−29 | 3.84E−43 |
| 37 | 1.04E−34 | 3.13E−48 | 5.88E−41 | 1.06E−29 | 3.84E−43 |
| 38 | 2.69E−37 | 3.79E−48 | 4.21E−43 | 9.89E−32 | 5.95E−40 |
| 39 | 2.84E−38 | 3.78E−14 | 1.15E−05 | 9.70E−31 | 9.25E−01 |
| 40 | 1.88E−36 | 1.05E−46 | 3.80E−41 | 1.01E−30 | 2.77E−43 |
| 41 | 4.01E−36 | 1.78E−19 | 2.93E−16 | 1.27E−21 | 2.46E−10 |
| 42 | 5.45E−16 | 4.08E−18 | 6.25E−28 | 7.56E−08 | 6.65E−46 |
| 43 | 1.13E−15 | 5.57E−18 | 9.82E−28 | 1.16E−07 | 1.05E−45 |
| 44 | 2.55E−25 | 6.58E−14 | 7.47E−22 | 3.89E−16 | 2.18E−20 |
| 45 | 5.14E−35 | 2.41E−27 | 5.02E−15 | 4.61E−29 | 2.22E−12 |
| 46 | 1.40E−36 | 2.78E−33 | 1.06E−29 | 5.12E−30 | 2.25E−28 |
| 47 | 3.46E−32 | 1.18E−32 | 1.62E−32 | 2.49E−29 | 1.62E−26 |
| 48 | 6.74E−36 | 1.36E−34 | 2.38E−34 | 1.27E−25 | 6.79E−29 |
| 49 | 9.64E−20 | 3.40E−22 | 1.36E−30 | 8.87E−18 | 1.54E−42 |
| 50 | 1.19E−26 | 1.97E−18 | 9.42E−19 | 1.46E−19 | 1.52E−12 |

TABLE 12f
Data for Klebsiella, particularly K. pneumoniae (continued)

| No. | GM_pv_adj | LVX_pv_adj | P/T_pv_adj | TO_pv_adj | T/S_pv_adj |
|---|---|---|---|---|---|
| 1 | 6.24E−60 | 3.97E−80 | 7.18E−96 | 1.21E−119 | 1.12E−106 |
| 2 | 6.10E−67 | 3.76E−55 | 1.20E−67 | 2.77E−105 | 3.59E−83 |
| 3 | 6.00E−68 | 3.14E−50 | 5.58E−70 | 1.37E−91 | 3.12E−110 |
| 4 | 3.06E−63 | 4.39E−52 | 7.17E−70 | 6.65E−91 | 1.85E−103 |
| 5 | 5.29E−59 | 6.80E−39 | 4.00E−51 | 1.40E−82 | 4.16E−97 |
| 6 | 5.64E−09 | 3.19E−59 | 3.01E−52 | 7.11E−48 | 1.50E−31 |
| 7 | 1.61E−05 | 6.12E−48 | 2.20E−40 | 1.45E−34 | 2.10E−20 |
| 8 | 1.57E−06 | 6.85E−37 | 6.06E−35 | 1.79E−29 | 2.02E−18 |
| 9 | 2.46E−06 | 1.41E−36 | 1.30E−34 | 3.62E−29 | 2.62E−18 |
| 10 | 2.46E−06 | 1.41E−36 | 1.30E−34 | 3.62E−29 | 2.62E−18 |
| 11 | 2.46E−06 | 1.41E−36 | 1.30E−34 | 3.62E−29 | 2.62E−18 |
| 12 | 2.30E−25 | 1.32E−53 | 6.01E−52 | 5.28E−59 | 5.07E−39 |
| 13 | 1.61E−25 | 2.14E−52 | 1.19E−50 | 1.22E−58 | 6.30E−38 |
| 14 | 6.89E−05 | 6.38E−32 | 9.66E−29 | 7.19E−31 | 3.05E−15 |
| 15 | 1.55E−23 | 1.89E−48 | 1.36E−48 | 1.49E−58 | 1.23E−46 |
| 16 | 7.14E−10 | 1.99E−38 | 1.30E−34 | 9.13E−37 | 1.47E−21 |
| 17 | 6.27E−40 | 9.96E−18 | 4.98E−31 | 1.50E−43 | 1.65E−56 |
| 18 | 7.35E−05 | 4.57E−28 | 1.61E−25 | 2.68E−27 | 2.50E−15 |
| 19 | 1.16E−19 | 5.28E−36 | 2.83E−54 | 2.59E−42 | 9.74E−48 |
| 20 | 1.16E−19 | 5.28E−36 | 2.83E−54 | 2.59E−42 | 9.74E−48 |
| 21 | 6.44E−22 | 5.93E−45 | 3.28E−47 | 2.84E−54 | 2.84E−46 |
| 22 | 6.19E−20 | 1.49E−36 | 4.90E−54 | 5.19E−43 | 1.61E−47 |
| 23 | 4.80E−20 | 5.67E−36 | 2.19E−53 | 1.90E−42 | 7.35E−49 |
| 24 | 1.78E−19 | 5.67E−36 | 2.19E−53 | 1.90E−42 | 6.83E−48 |
| 25 | 1.71E−21 | 3.92E−44 | 2.20E−46 | 1.09E−52 | 8.26E−45 |
| 26 | 1.49E−20 | 1.39E−44 | 1.02E−46 | 1.38E−52 | 9.52E−46 |
| 27 | 9.23E−19 | 4.68E−44 | 1.13E−48 | 2.14E−52 | 7.18E−42 |
| 28 | 1.04E−18 | 2.43E−47 | 2.68E−42 | 8.73E−48 | 1.22E−43 |
| 29 | 1.81E−19 | 6.48E−47 | 5.36E−42 | 7.69E−49 | 5.28E−43 |
| 30 | 1.67E−04 | 1.19E−33 | 1.48E−27 | 1.33E−24 | 2.01E−19 |
| 31 | 2.71E−19 | 3.53E−46 | 2.81E−41 | 2.57E−47 | 3.11E−43 |
| 32 | 3.53E−20 | 6.26E−46 | 5.36E−42 | 7.69E−49 | 5.57E−44 |
| 33 | 4.08E−20 | 9.51E−46 | 1.44E−41 | 1.11E−48 | 8.48E−44 |
| 34 | 9.00E−16 | 3.30E−45 | 1.53E−41 | 3.99E−46 | 1.50E−39 |
| 35 | 4.69E−14 | 4.82E−45 | 1.45E−39 | 3.68E−47 | 5.85E−39 |
| 36 | 6.72E−15 | 8.68E−45 | 4.34E−42 | 8.00E−45 | 1.33E−38 |
| 37 | 6.72E−15 | 8.68E−45 | 4.34E−42 | 8.00E−45 | 1.33E−38 |
| 38 | 4.79E−19 | 4.19E−45 | 5.36E−42 | 3.42E−47 | 5.28E−43 |
| 39 | 1.94E−40 | 1.06E−10 | 6.27E−21 | 4.23E−35 | 2.60E−47 |
| 40 | 1.53E−15 | 3.13E−43 | 2.72E−42 | 3.02E−45 | 1.22E−39 |
| 41 | 9.94E−38 | 3.55E−16 | 4.46E−22 | 7.61E−44 | 1.24E−41 |
| 42 | 2.34E−02 | 4.47E−21 | 3.44E−16 | 3.10E−15 | 2.24E−09 |
| 43 | 2.39E−02 | 1.02E−20 | 4.32E−16 | 6.38E−15 | 3.86E−09 |
| 44 | 3.44E−22 | 5.51E−13 | 6.56E−18 | 4.39E−24 | 1.24E−45 |
| 45 | 1.36E−21 | 1.14E−24 | 2.38E−33 | 2.46E−45 | 1.53E−29 |
| 46 | 1.36E−19 | 4.39E−32 | 1.03E−35 | 9.03E−45 | 5.01E−44 |
| 47 | 1.18E−14 | 5.29E−30 | 3.76E−40 | 3.55E−44 | 5.56E−38 |
| 48 | 4.91E−17 | 8.23E−33 | 1.06E−40 | 6.11E−39 | 4.88E−43 |
| 49 | 1.35E−04 | 2.25E−22 | 1.78E−19 | 5.28E−22 | 2.63E−12 |
| 50 | 8.68E−26 | 1.45E−15 | 1.73E−22 | 6.68E−34 | 1.90E−42 |

TABLE 12g
Data for Klebsiella, particularly K. pneumoniae (continued)

| No. | Locus.Tag | Gene.Symbol | GenBank.Accession | Chromosome |
|---|---|---|---|---|
| 1 | SSON_3896 | aadA | YP_312670 | |
| 2 | SeHA_C1580 | blaT | YP_002045448 | |
| 3 | HMPREF9345_05066 | | ZP_07100147 | |
| 4 | KPN_pKPN5p08201 | | YP_001338811 | plasmid pKPN5 |
| 5 | Salmoentericaenterica_010100000245 | | ZP_02702077 | |
| 6 | KPN2242_07235 | | AEJ97365 | |
| 7 | KPN2242_00750 | | AEJ96075 | |
| 8 | HMPREF0484_1390 | mgtA | ZP_06014374 | |
| 9 | Kvar_3592 | | YP_003440504 | |
| 10 | KPK_A0103 | | YP_002235751 | plasmid pKP187 |
| 11 | HMPREF0484_1392 | pacL | ZP_06014376 | |
| 12 | HMPREF9534_04427 | | ZP_07188952 | |
| 13 | CKO_pCKO3p06155 | | YP_001456633 | plasmid pCKO3 |
| 14 | HMPREF0484_0044 | vmtV | ZP_06013029 | |
| 15 | HMPREF0484_2697 | | ZP_06015679 | |
| 16 | HMPREF0485_04762 | | ZP_06552358 | |
| 17 | EcolB_01004576 | | ZP_00708527 | |
| 18 | HMPREF0484_0046 | | ZP_06013031 | |
| 19 | HMPREF9538_00440 | | ZP_08302804 | |
| 20 | KPN_pKPN3p05893 | ptxE | YP_001338502 | plasmid pKPN3 |
| 21 | KPN2242_07425 | | AEJ97403 | |
| 22 | KPN_pKPN3p05890 | ptxB | YP_001338499 | plasmid pKPN3 |
| 23 | HMPREF9538_00443 | | ZP_08302807 | |
| 24 | KPN_pKPN3p05891 | ptxC | YP_001338500 | plasmid pKPN3 |
| 25 | HMPREF0484_2686 | | ZP_06015668 | |
| 26 | HMPREF0484_2687 | gpw | ZP_06015669 | |
| 27 | HMPREF0484_2684 | | ZP_06015666 | |
| 28 | ECL_04426 | | YP_003614904 | |
| 29 | KPN2242_07415 | | AEJ97401 | |
| 30 | HMPREF0485_03923 | | ZP_06551519 | |
| 31 | Salmonellentericaenterica_010100016432 | | ZP_03412648 | |
| 32 | HMPREF0484_2698 | | ZP_06015680 | |
| 33 | HMPREF0484_2694 | fii | ZP_06015676 | |
| 34 | KPN2242_07345 | | AEJ97387 | |
| 35 | KPN2242_07330 | | AEJ97384 | |
| 36 | KPN2242_07325 | | AEJ97383 | |
| 37 | HMPREF0484_2676 | | ZP_06015658 | |
| 38 | ECL_04434 | | YP_003614912 | |
| 39 | HMPREF9538_04737 | | ZP_08307036 | |
| 40 | HMPREF0484_2673 | | ZP_06015655 | |
| 41 | SeSA_B0079 | | YP_002112958 | plasmid |
| | | | | pCVM19633_110 |
| 42 | Kvar_2527 | | YP_003439449 | |
| 43 | Dd1591_2579 | | YP_003004893 | |
| 44 | ETAE_p041 | folP | YP_003297635 | plasmid pEIB202 |
| 45 | STMDT12_C39340 | | BAJ38877 | |
| 46 | SC026 | aph | YP_209331 | plasmid pSC138 |
| 47 | STMDT12_C39170 | | BAJ38860 | |
| 48 | HMPREF9538_01820 | | ZP_08304144 | |
| 49 | t1924 | exo | NP_805691 | |
| 50 | pK2044_00525 | | YP_001687935 | plasmid pK2044 |

TABLE 12h
Data for Klebsiella, particularly K. pneumoniae (continued)

| No. | Start.Coord | End.Coord | Strand | Scaffold.ID |
|---|---|---|---|---|
| 1 | 4110458 | 4111246 | − | 640427102 |
| 2 | 1525960 | 1526820 | + | 642555218 |
| 3 | 4715 | 5554 | − | 648294624 |
| 4 | 34908 | 35255 | − | 640753021 |
| 5 | 36757 | 37062 | + | 641778223 |
| 6 | 1535907 | 1536932 | − | 651053122 |
| 7 | 159235 | 160521 | − | 651053122 |
| 8 | 2865 | 3848 | − | 647009817 |
| 9 | 3765814 | 3768501 | − | 646312028 |
| 10 | 67987 | 70674 | + | 643348532 |
| 11 | 4691 | 5551 | − | 647009817 |
| 12 | 2120 | 2368 | + | 648289812 |
| 13 | 8632 | 8931 | + | 640753081 |
| 14 | 12911 | 13663 | + | 647009752 |
| 15 | 20402 | 22975 | + | 647009874 |
| 16 | 93128 | 94558 | + | 647536396 |
| 17 | 3555 | 4568 | + | 638359041 |
| 18 | 14573 | 15328 | + | 647009752 |
| 19 | 933 | 1943 | − | 651332959 |
| 20 | 38514 | 39383 | + | 640753019 |
| 21 | 1563447 | 1563746 | + | 651053122 |
| 22 | 35802 | 36665 | + | 640753019 |
| 23 | 3648 | 4475 | − | 651332959 |
| 24 | 36662 | 37501 | + | 640753019 |
| 25 | 11204 | 11776 | + | 647009874 |
| 26 | 11773 | 12132 | + | 647009874 |
| 27 | 10265 | 10696 | + | 647009874 |
| 28 | 4537618 | 4539336 | + | 646564624 |
| 29 | 1561697 | 1562869 | + | 651053122 |
| 30 | 51251 | 51370 | − | 647536393 |
| 31 | 154 | 357 | − | 643042634 |
| 32 | 23022 | 23267 | + | 647009874 |
| 33 | 19408 | 19923 | + | 647009874 |
| 34 | 1552497 | 1552712 | + | 651053122 |
| 35 | 1551079 | 1551729 | + | 651053122 |
| 36 | 1550023 | 1551075 | + | 651053122 |
| 37 | 6165 | 7229 | + | 647009874 |
| 38 | 4543715 | 4546123 | − | 646564624 |
| 39 | 1555 | 2055 | − | 651333542 |
| 40 | 2380 | 3411 | − | 647009874 |
| 41 | 68933 | 70240 | + | 642555219 |
| 42 | 2637299 | 2637790 | + | 646312028 |
| 43 | 2932956 | 2933891 | + | 644736389 |
| 44 | 32101 | 32916 | − | 646311959 |
| 45 | 4084530 | 4085237 | − | 651053007 |
| 46 | 21137 | 21952 | − | 637000354 |
| 47 | 4067283 | 4067942 | + | 651053007 |
| 48 | 2070 | 2927 | − | 651333149 |
| 49 | 1967759 | 1968439 | + | 637000205 |
| 50 | 78317 | 81286 | − | 646564501 |

[0266] Example 7: Proteus, particularly Proteus mirabilis, Proteus penneri and/or Proteus vulgaris

[0267] The procedure was carried out as in Example 1, except that the following microorganisms were used:

[0268] Bacterial Strains

[0269] The inventors selected 582 Proteus strains from the microbiology strain collection at Siemens Healthcare Diagnostics (West Sacramento, Calif.) for susceptibility testing and whole genome sequencing.

[0270] From MetaRef, 2318 centroids of Proteus species were used as reference sequences.

[0271] The results for Proteus are shown in Tables 13 (corresponding to Table 1) and 14 (corresponding to Table 2).

TABLE 13a
Data for Proteus species

| | Scaffold.External. | | |
|---|---|---|---|
| No. | Accession | Scaffold.Name | best_pv |
| 1 | NZ_ABVP01000020 | Proteus penneri ATCC 35198 P_penneri-1.1.1_Cont338: NZ_ABVP01000020 | 9.1377556355866E−62 |
| 2 | NZ_ABVP01000025 | Proteus penneri ATCC 35198 P_penneri-1.1.1_Cont344: NZ_ABVP01000025 | 9.1377556355866E−62 |
| 3 | NZ_ABVP01000025 | Proteus penneri ATCC 35198 P_penneri-1.1.1_Cont344: NZ_ABVP01000025 | 9.1377556355866E−62 |
| 4 | NZ_ABVP01000023 | Proteus penneri ATCC 35198 P_penneri-1.1.1_Cont336: NZ_ABVP01000023 | 9.1377556355866E−62 |
| 5 | NZ_ABVP01000026 | Proteus penneri ATCC 35198 P_penneri-1.1.1_Cont348: NZ_ABVP01000026 | 9.1377556355866E−62 |
| 6 | NZ_ABVP01000019 | Proteus penneri ATCC 35198 P_penneri-1.1.1_Cont6.1: NZ_ABVP01000019 | 9.1377556355866E−62 |
| 7 | NZ_ABVP01000021 | Proteus penneri ATCC 35198 P_penneri-1.1.1_Cont356: NZ_ABVP01000021 | 9.1377556355866E−62 |
| 8 | NC_010554 | Proteus mirabilis HI4320: NC_010554 | 9.1377556355866E−62 |
| 9 | NZ_ABVP01000022 | Proteus penneri ATCC 35198 P_penneri-1.1.1_Cont341: NZ_ABVP01000022 | 9.1377556355866E−62 |
| 10 | NZ_ABVP01000026 | Proteus penneri ATCC 35198 P_penneri-1.1.1_Cont348: NZ_ABVP01000026 | 9.1377556355866E−62 |
| 11 | NZ_ABVP01000026 | Proteus penneri ATCC 35198 P_penneri-1.1.1_Cont348: NZ_ABVP01000026 | 9.1377556355866E−62 |
| 12 | NZ_ABVP01000014 | Proteus penneri ATCC 35198 P_penneri-1.1.1_Cont350: NZ_ABVP01000014 | 9.1377556355866E−62 |
| 13 | NZ_ABVP01000026 | Proteus penneri ATCC 35198 P_penneri-1.1.1_Cont348: NZ_ABVP01000026 | 9.1377556355866E−62 |
| 14 | NZ_ABVP01000025 | Proteus penneri ATCC 35198 P_penneri-1.1.1_Cont344: NZ_ABVP01000025 | 9.1377556355866E−62 |
| 15 | NZ_ABVP01000025 | Proteus penneri ATCC 35198 P_penneri-1.1.1_Cont344: NZ_ABVP01000025 | 9.1377556355866E−62 |
| 16 | NC_010554 | Proteus mirabilis HI4320: NC_010554 | 9.1377556355866E−62 |
| 17 | NZ_ABVP01000022 | Proteus penneri ATCC 35198 P_penneri-1.1.1_Cont341: NZ_ABVP01000022 | 9.1377556355866E−62 |
| 18 | NZ_ACLE01000064 | Proteus mirabilis ATCC 29906 contig00088: NZ_ACLE01000064 | 9.1377556355866E−62 |
| 19 | NZ_ABVP01000026 | Proteus penneri ATCC 35198 P_penneri-1.1.1_Cont348: NZ_ABVP01000026 | 9.1377556355866E−62 |
| 20 | NZ_ABVP01000026 | Proteus penneri ATCC 35198 P_penneri-1.1.1_Cont348: NZ_ABVP01000026 | 9.1377556355866E−62 |
| 21 | NZ_ABVP01000026 | Proteus penneri ATCC 35198 P_penneri-1.1.1_Cont348: NZ_ABVP01000026 | 9.1377556355866E−62 |
| 22 | NZ_ABVP01000022 | Proteus penneri ATCC 35198 P_penneri-1.1.1_Cont341: NZ_ABVP01000022 | 9.1377556355866E−62 |
| 23 | NZ_ABVP01000025 | Proteus penneri ATCC 35198 P_penneri-1.1.1_Cont344: NZ_ABVP01000025 | 9.1377556355866E−62 |
| 24 | NZ_ABVP01000025 | Proteus penneri ATCC 35198 P_penneri-1.1.1_Cont344: NZ_ABVP01000025 | 9.1377556355866E−62 |
| 25 | NZ_ABVP01000025 | Proteus penneri ATCC 35198 P_penneri-1.1.1_Cont344: NZ_ABVP01000025 | 9.1377556355866E−62 |
| 26 | NZ_ABVP01000025 | Proteus penneri ATCC 35198 P_penneri-1.1.1_Cont344: NZ_ABVP01000025 | 9.1377556355866E−62 |
| 27 | NZ_ABVP01000025 | Proteus penneri ATCC 35198 P_penneri-1.1.1_Cont344: NZ_ABVP01000025 | 9.1377556355866E−62 |
| 28 | NZ_ABVP01000025 | Proteus penneri ATCC 35198 P_penneri-1.1.1_Cont344: NZ_ABVP01000025 | 9.1377556355866E−62 |
| 29 | NC_010554 | Proteus mirabilis HI4320: NC_010554 | 9.1377556355866E−62 |
| 30 | NZ_ABVP01000021 | Proteus penneri ATCC 35198 P_penneri-1.1.1_Cont356: NZ_ABVP01000021 | 9.1377556355866E−62 |
| 31 | NZ_ABVP01000020 | Proteus penneri ATCC 35198 P_penneri-1.1.1_Cont338: NZ_ABVP01000020 | 9.1377556355866E−62 |
| 32 | NZ_ABVP01000025 | Proteus penneri ATCC 35198 P_penneri-1.1.1_Cont344: NZ_ABVP01000025 | 9.1377556355866E−62 |
| 33 | NZ_ABVP01000025 | Proteus penneri ATCC 35198 P_penneri-1.1.1_Cont344: NZ_ABVP01000025 | 9.1377556355866E−62 |
| 34 | NZ_ABVP01000023 | Proteus penneri ATCC 35198 P_penneri-1.1.1_Cont336: NZ_ABVP01000023 | 9.1377556355866E−62 |
| 35 | NZ_ABVP01000022 | Proteus penneri ATCC 35198 P_penneri-1.1.1_Cont341: NZ_ABVP01000022 | 9.1377556355866E−62 |
| 36 | NZ_ABVP01000025 | Proteus penneri ATCC 35198 P_penneri-1.1.1_Cont344: NZ_ABVP01000025 | 9.1377556355866E−62 |
| 37 | NZ_ABVP01000024 | Proteus penneri ATCC 35198 P_penneri-1.1.1_Cont334: NZ_ABVP01000024 | 9.1377556355866E−62 |
| 38 | NZ_ABVP01000025 | Proteus penneri ATCC 35198 P_penneri-1.1.1_Cont344: NZ_ABVP01000025 | 9.1377556355866E−62 |
| 39 | NC_010554 | Proteus mirabilis HI4320: NC_010554 | 9.1377556355866E−62 |
| 40 | NZ_ABVP01000019 | Proteus penneri ATCC 35198 P_penneri-1.1.1_Cont6.1: NZ_ABVP01000019 | 9.1377556355866E−62 |
| 41 | NZ_ABVP01000019 | Proteus penneri ATCC 35198 P_penneri-1.1.1_Cont6.1: NZ_ABVP01000019 | 9.1377556355866E−62 |
| 42 | NZ_ABVP01000025 | Proteus penneri ATCC 35198 P_penneri-1.1.1_Cont344: NZ_ABVP01000025 | 9.1377556355866E−62 |
| 43 | NZ_ABVP01000020 | Proteus penneri ATCC 35198 P_penneri-1.1.1_Cont338: NZ_ABVP01000020 | 9.1377556355866E−62 |
| 44 | NZ_ABVP01000023 | Proteus penneri ATCC 35198 P_penneri-1.1.1_Cont336: NZ_ABVP01000023 | 9.1377556355866E−62 |
| 45 | NZ_ABVP01000026 | Proteus penneri ATCC 35198 P_penneri-1.1.1_Cont348: NZ_ABVP01000026 | 9.1377556355866E−62 |
| 46 | NZ_ABVP01000025 | Proteus penneri ATCC 35198 P_penneri-1.1.1_Cont344: NZ_ABVP01000025 | 9.1377556355866E−62 |
| 47 | NZ_ABVP01000021 | Proteus penneri ATCC 35198 P_penneri-1.1.1_Cont356: NZ_ABVP01000021 | 9.1377556355866E−62 |
| 48 | NZ_ACLE01000079 | Proteus mirabilis ATCC 29906 contig00105: NZ_ACLE01000079 | 9.1377556355866E−62 |
| 49 | NC_010554 | Proteus mirabilis HI4320: NC_010554 | 9.1377556355866E−62 |
| 50 | NZ_ABVP01000023 | Proteus penneri ATCC 35198 P_penneri-1.1.1_Cont336: NZ_ABVP01000023 | 9.1377556355866E−62 |

TABLE 13b
Data for Proteus species (continued)

| No. | sign_phenos | sign_phenos_class | best_pheno | best_pheno_class |
|---|---|---|---|---|
| 1 | AM; CAX; CP; CRM; GM; LVX; TO; T/S | aminoglycoside; fluoroquinolone; lactam; other | CRM | lactam |
| 2 | AM; CAX; CP; CRM; GM; LVX; TO; T/S | aminoglycoside; fluoroquinolone; lactam; other | CRM | lactam |
| 3 | AM; CAX; CP; CRM; GM; LVX; TO; T/S | aminoglycoside; fluoroquinolone; lactam; other | CRM | lactam |
| 4 | AM; CAX; CP; CRM; GM; LVX; TO; T/S | aminoglycoside; fluoroquinolone; lactam; other | CRM | lactam |
| 5 | AM; CAX; CP; CRM; GM; LVX; TO; T/S | aminoglycoside; fluoroquinolone; lactam; other | CRM | lactam |
| 6 | AM; CAX; CP; CRM; GM; LVX; TO; T/S | aminoglycoside; fluoroquinolone; lactam; other | CRM | lactam |
| 7 | AM; CAX; CP; CRM; GM; LVX; TO; T/S | aminoglycoside; fluoroquinolone; lactam; other | CRM | lactam |
| 8 | AM; CAX; CP; CRM; GM; LVX; TO; T/S | aminoglycoside; fluoroquinolone; lactam; other | CRM | lactam |
| 9 | AM; CAX; CP; CRM; GM; LVX; TO; T/S | aminoglycoside; fluoroquinolone; lactam; other | CRM | lactam |
| 10 | AM; CAX; CP; CRM; GM; LVX; TO; T/S | aminoglycoside; fluoroquinolone; lactam; other | CRM | lactam |
| 11 | AM; CAX; CP; CRM; GM; LVX; TO; T/S | aminoglycoside; fluoroquinolone; lactam; other | CRM | lactam |
| 12 | AM; CAX; CP; CRM; GM; LVX; TO; T/S | aminoglycoside; fluoroquinolone; lactam; other | CRM | lactam |
| 13 | AM; CAX; CP; CRM; GM; LVX; TO; T/S | aminoglycoside; fluoroquinolone; lactam; other | CRM | lactam |
| 14 | AM; CAX; CP; CRM; GM; LVX; TO; T/S | aminoglycoside; fluoroquinolone; lactam; other | CRM | lactam |
| 15 | AM; CAX; CP; CRM; GM; LVX; TO; T/S | aminoglycoside; fluoroquinolone; lactam; other | CRM | lactam |
| 16 | AM; CAX; CP; CRM; GM; LVX; TO; T/S | aminoglycoside; fluoroquinolone; lactam; other | CRM | lactam |
| 17 | AM; CAX; CP; CRM; GM; LVX; TO; T/S | aminoglycoside; fluoroquinolone; lactam; other | CRM | lactam |
| 18 | AM; CAX; CP; CRM; GM; LVX; TO; T/S | aminoglycoside; fluoroquinolone; lactam; other | CRM | lactam |
| 19 | AM; CAX; CP; CRM; GM; LVX; TO; T/S | aminoglycoside; fluoroquinolone; lactam; other | CRM | lactam |
| 20 | AM; CAX; CP; CRM; GM; LVX; TO; T/S | aminoglycoside; fluoroquinolone; lactam; other | CRM | lactam |
| 21 | AM; CAX; CP; CRM; GM; LVX; TO; T/S | aminoglycoside; fluoroquinolone; lactam; other | CRM | lactam |
| 22 | AM; CAX; CP; CRM; GM; LVX; TO; T/S | aminoglycoside; fluoroquinolone; lactam; other | CRM | lactam |
| 23 | AM; CAX; CP; CRM; GM; LVX; TO; T/S | aminoglycoside; fluoroquinolone; lactam; other | CRM | lactam |
| 24 | AM; CAX; CP; CRM; GM; LVX; TO; T/S | aminoglycoside; fluoroquinolone; lactam; other | CRM | lactam |
| 25 | AM; CAX; CP; CRM; GM; LVX; TO; T/S | aminoglycoside; fluoroquinolone; lactam; other | CRM | lactam |
| 26 | AM; CAX; CP; CRM; GM; LVX; TO; T/S | aminoglycoside; fluoroquinolone; lactam; other | CRM | lactam |
| 27 | AM; CAX; CP; CRM; GM; LVX; TO; T/S | aminoglycoside; fluoroquinolone; lactam; other | CRM | lactam |
| 28 | AM; CAX; CP; CRM; GM; LVX; TO; T/S | aminoglycoside; fluoroquinolone; lactam; other | CRM | lactam |
| 29 | AM; CAX; CP; CRM; GM; LVX; TO; T/S | aminoglycoside; fluoroquinolone; lactam; other | CRM | lactam |
| 30 | AM; CAX; CP; CRM; GM; LVX; TO; T/S | aminoglycoside; fluoroquinolone; lactam; other | CRM | lactam |
| 31 | AM; CAX; CP; CRM; GM; LVX; TO; T/S | aminoglycoside; fluoroquinolone; lactam; other | CRM | lactam |
| 32 | AM; CAX; CP; CRM; GM; LVX; TO; T/S | aminoglycoside; fluoroquinolone; lactam; other | CRM | lactam |
| 33 | AM; CAX; CP; CRM; GM; LVX; TO; T/S | aminoglycoside; fluoroquinolone; lactam; other | CRM | lactam |
| 34 | AM; CAX; CP; CRM; GM; LVX; TO; T/S | aminoglycoside; fluoroquinolone; lactam; other | CRM | lactam |
| 35 | AM; CAX; CP; CRM; GM; LVX; TO; T/S | aminoglycoside; fluoroquinolone; lactam; other | CRM | lactam |
| 36 | AM; CAX; CP; CRM; GM; LVX; TO; T/S | aminoglycoside; fluoroquinolone; lactam; other | CRM | lactam |
| 37 | AM; CAX; CP; CRM; GM; LVX; TO; T/S | aminoglycoside; fluoroquinolone; lactam; other | CRM | lactam |
| 38 | AM; CAX; CP; CRM; GM; LVX; TO; T/S | aminoglycoside; fluoroquinolone; lactam; other | CRM | lactam |
| 39 | AM; CAX; CP; CRM; GM; LVX; TO; T/S | aminoglycoside; fluoroquinolone; lactam; other | CRM | lactam |
| 40 | AM; CAX; CP; CRM; GM; LVX; TO; T/S | aminoglycoside; fluoroquinolone; lactam; other | CRM | lactam |
| 41 | AM; CAX; CP; CRM; GM; LVX; TO; T/S | aminoglycoside; fluoroquinolone; lactam; other | CRM | lactam |
| 42 | AM; CAX; CP; CRM; GM; LVX; TO; T/S | aminoglycoside; fluoroquinolone; lactam; other | CRM | lactam |
| 43 | AM; CAX; CP; CRM; GM; LVX; TO; T/S | aminoglycoside; fluoroquinolone; lactam; other | CRM | lactam |
| 44 | AM; CAX; CP; CRM; GM; LVX; TO; T/S | aminoglycoside; fluoroquinolone; lactam; other | CRM | lactam |
| 45 | AM; CAX; CP; CRM; GM; LVX; TO; T/S | aminoglycoside; fluoroquinolone; lactam; other | CRM | lactam |
| 46 | AM; CAX; CP; CRM; GM; LVX; TO; T/S | aminoglycoside; fluoroquinolone; lactam; other | CRM | lactam |
| 47 | AM; CAX; CP; CRM; GM; LVX; TO; T/S | aminoglycoside; fluoroquinolone; lactam; other | CRM | lactam |
| 48 | AM; CAX; CP; CRM; GM; LVX; TO; T/S | aminoglycoside; fluoroquinolone; lactam; other | CRM | lactam |
| 49 | AM; CAX; CP; CRM; GM; LVX; TO; T/S | aminoglycoside; fluoroquinolone; lactam; other | CRM | lactam |
| 50 | AM; CAX; CP; CRM; GM; LVX; TO; T/S | aminoglycoside; fluoroquinolone; lactam; other | CRM | lactam |

TABLE 13c
Data for Proteus species (continued)

| No. | num_aminoglycoside | num_fluoroquinolone | num_lactam | num_other |
|---|---|---|---|---|
| 1 | 2 | 2 | 3 | 1 |
| 2 | 2 | 2 | 3 | 1 |
| 3 | 2 | 2 | 3 | 1 |
| 4 | 2 | 2 | 3 | 1 |
| 5 | 2 | 2 | 3 | 1 |
| 6 | 2 | 2 | 3 | 1 |
| 7 | 2 | 2 | 3 | 1 |
| 8 | 2 | 2 | 3 | 1 |
| 9 | 2 | 2 | 3 | 1 |
| 10 | 2 | 2 | 3 | 1 |
| 11 | 2 | 2 | 3 | 1 |
| 12 | 2 | 2 | 3 | 1 |
| 13 | 2 | 2 | 3 | 1 |
| 14 | 2 | 2 | 3 | 1 |
| 15 | 2 | 2 | 3 | 1 |
| 16 | 2 | 2 | 3 | 1 |
| 17 | 2 | 2 | 3 | 1 |
| 18 | 2 | 2 | 3 | 1 |
| 19 | 2 | 2 | 3 | 1 |
| 20 | 2 | 2 | 3 | 1 |
| 21 | 2 | 2 | 3 | 1 |
| 22 | 2 | 2 | 3 | 1 |
| 23 | 2 | 2 | 3 | 1 |
| 24 | 2 | 2 | 3 | 1 |
| 25 | 2 | 2 | 3 | 1 |
| 26 | 2 | 2 | 3 | 1 |
| 27 | 2 | 2 | 3 | 1 |
| 28 | 2 | 2 | 3 | 1 |
| 29 | 2 | 2 | 3 | 1 |
| 30 | 2 | 2 | 3 | 1 |
| 31 | 2 | 2 | 3 | 1 |
| 32 | 2 | 2 | 3 | 1 |
| 33 | 2 | 2 | 3 | 1 |
| 34 | 2 | 2 | 3 | 1 |
| 35 | 2 | 2 | 3 | 1 |
| 36 | 2 | 2 | 3 | 1 |
| 37 | 2 | 2 | 3 | 1 |
| 38 | 2 | 2 | 3 | 1 |
| 39 | 2 | 2 | 3 | 1 |
| 40 | 2 | 2 | 3 | 1 |
| 41 | 2 | 2 | 3 | 1 |
| 42 | 2 | 2 | 3 | 1 |
| 43 | 2 | 2 | 3 | 1 |
| 44 | 2 | 2 | 3 | 1 |
| 45 | 2 | 2 | 3 | 1 |
| 46 | 2 | 2 | 3 | 1 |
| 47 | 2 | 2 | 3 | 1 |
| 48 | 2 | 2 | 3 | 1 |
| 49 | 2 | 2 | 3 | 1 |
| 50 | 2 | 2 | 3 | 1 |

TABLE 13d
Data for Proteus species (continued)

| No. | AM_pv_adj | A/S_pv_adj | CAX_pv_adj | CP_pv_adj | CRM_pv_adj |
|---|---|---|---|---|---|
| 1 | 3.94E−36 | 1 | 1.38E−16 | 1.03E−08 | 9.14E−62 |
| 2 | 3.94E−36 | 1 | 1.38E−16 | 1.03E−08 | 9.14E−62 |
| 3 | 3.94E−36 | 1 | 1.38E−16 | 1.03E−08 | 9.14E−62 |
| 4 | 3.94E−36 | 1 | 1.38E−16 | 1.03E−08 | 9.14E−62 |
| 5 | 3.94E−36 | 1 | 1.38E−16 | 1.03E−08 | 9.14E−62 |
| 6 | 3.94E−36 | 1 | 1.38E−16 | 1.03E−08 | 9.14E−62 |
| 7 | 3.94E−36 | 1 | 1.38E−16 | 1.03E−08 | 9.14E−62 |
| 8 | 5.45E−37 | 9.36E−01 | 4.09E−17 | 7.21E−08 | 9.14E−62 |
| 9 | 3.94E−36 | 1 | 1.38E−16 | 1.03E−08 | 9.14E−62 |
| 10 | 3.94E−36 | 1 | 1.38E−16 | 1.03E−08 | 9.14E−62 |
| 11 | 3.94E−36 | 1 | 1.38E−16 | 1.03E−08 | 9.14E−62 |
| 12 | 3.94E−36 | 1 | 1.38E−16 | 1.03E−08 | 9.14E−62 |
| 13 | 3.94E−36 | 1 | 1.38E−16 | 1.03E−08 | 9.14E−62 |
| 14 | 3.94E−36 | 1 | 1.38E−16 | 1.03E−08 | 9.14E−62 |
| 15 | 3.94E−36 | 1 | 1.38E−16 | 1.03E−08 | 9.14E−62 |
| 16 | 3.94E−36 | 1 | 1.38E−16 | 1.03E−08 | 9.14E−62 |
| 17 | 3.94E−36 | 1 | 1.38E−16 | 1.03E−08 | 9.14E−62 |
| 18 | 3.94E−36 | 1 | 1.38E−16 | 1.03E−08 | 9.14E−62 |
| 19 | 3.94E−36 | 1 | 1.38E−16 | 1.03E−08 | 9.14E−62 |
| 20 | 3.94E−36 | 1 | 1.38E−16 | 1.03E−08 | 9.14E−62 |
| 21 | 1.07E−35 | 9.36E−01 | 8.67E−17 | 1.70E−08 | 9.14E−62 |
| 22 | 3.94E−36 | 1 | 1.38E−16 | 1.03E−08 | 9.14E−62 |
| 23 | 3.94E−36 | 1 | 1.38E−16 | 1.03E−08 | 9.14E−62 |
| 24 | 3.94E−36 | 1 | 1.38E−16 | 1.03E−08 | 9.14E−62 |
| 25 | 3.94E−36 | 1 | 1.38E−16 | 1.03E−08 | 9.14E−62 |
| 26 | 3.94E−36 | 1 | 1.38E−16 | 1.03E−08 | 9.14E−62 |
| 27 | 3.94E−36 | 1 | 1.38E−16 | 1.03E−08 | 9.14E−62 |
| 28 | 3.94E−36 | 1 | 1.38E−16 | 1.03E−08 | 9.14E−62 |
| 29 | 3.94E−36 | 1 | 1.38E−16 | 1.03E−08 | 9.14E−62 |
| 30 | 3.94E−36 | 1 | 1.38E−16 | 1.03E−08 | 9.14E−62 |
| 31 | 3.94E−36 | 1 | 1.38E−16 | 1.03E−08 | 9.14E−62 |
| 32 | 3.94E−36 | 1 | 1.38E−16 | 1.03E−08 | 9.14E−62 |
| 33 | 3.94E−36 | 1 | 1.38E−16 | 1.03E−08 | 9.14E−62 |
| 34 | 3.94E−36 | 1 | 1.38E−16 | 1.03E−08 | 9.14E−62 |
| 35 | 3.94E−36 | 1 | 1.38E−16 | 1.03E−08 | 9.14E−62 |
| 36 | 3.94E−36 | 1 | 1.38E−16 | 1.03E−08 | 9.14E−62 |
| 37 | 3.94E−36 | 1 | 1.38E−16 | 1.03E−08 | 9.14E−62 |
| 38 | 3.94E−36 | 1 | 1.38E−16 | 1.03E−08 | 9.14E−62 |
| 39 | 5.45E−37 | 9.36E−01 | 4.09E−17 | 6.06E−09 | 9.14E−62 |
| 40 | 3.94E−36 | 1 | 1.38E−16 | 1.03E−08 | 9.14E−62 |
| 41 | 3.94E−36 | 1 | 1.38E−16 | 1.03E−08 | 9.14E−62 |
| 42 | 3.94E−36 | 1 | 1.38E−16 | 1.03E−08 | 9.14E−62 |
| 43 | 3.94E−36 | 1 | 1.38E−16 | 1.03E−08 | 9.14E−62 |
| 44 | 3.94E−36 | 1 | 1.38E−16 | 1.03E−08 | 9.14E−62 |
| 45 | 3.94E−36 | 1 | 1.38E−16 | 1.03E−08 | 9.14E−62 |
| 46 | 3.94E−36 | 1 | 1.38E−16 | 1.03E−08 | 9.14E−62 |
| 47 | 1.07E−35 | 9.36E−01 | 8.67E−17 | 1.70E−08 | 9.14E−62 |
| 48 | 6.31E−38 | 5.69E−01 | 1.13E−16 | 4.44E−07 | 9.14E−62 |
| 49 | 1.56E−36 | 8.45E−01 | 2.42E−17 | 1.26E−07 | 9.14E−62 |
| 50 | 3.94E−36 | 1 | 1.38E−16 | 1.03E−08 | 9.14E−62 |

TABLE 13e
Data for Proteus species (continued)

| No. | GM_pv_adj | LVX_pv_adj | TO_pv_adj | T/S_pv_adj |
|---|---|---|---|---|
| 1 | 3.39E−06 | 1.43E−06 | 6.08E−05 | 2.82E−06 |
| 2 | 3.39E−06 | 1.43E−06 | 6.08E−05 | 2.82E−06 |
| 3 | 3.39E−06 | 1.43E−06 | 6.08E−05 | 2.82E−06 |
| 4 | 3.39E−06 | 1.43E−06 | 6.08E−05 | 2.82E−06 |
| 5 | 3.39E−06 | 1.43E−06 | 6.08E−05 | 2.82E−06 |
| 6 | 3.39E−06 | 1.43E−06 | 6.08E−05 | 2.82E−06 |
| 7 | 3.39E−06 | 1.43E−06 | 6.08E−05 | 2.82E−06 |
| 8 | 4.54E−05 | 4.64E−06 | 3.83E−05 | 1.26E−05 |
| 9 | 3.39E−06 | 1.43E−06 | 6.08E−05 | 2.82E−06 |
| 10 | 3.39E−06 | 1.43E−06 | 6.08E−05 | 2.82E−06 |
| 11 | 3.39E−06 | 1.43E−06 | 6.08E−05 | 2.82E−06 |
| 12 | 3.39E−06 | 1.43E−06 | 6.08E−05 | 2.82E−06 |
| 13 | 3.39E−06 | 1.43E−06 | 6.08E−05 | 2.82E−06 |
| 14 | 3.39E−06 | 1.43E−06 | 6.08E−05 | 2.82E−06 |
| 15 | 3.39E−06 | 1.43E−06 | 6.08E−05 | 2.82E−06 |
| 16 | 3.39E−06 | 1.43E−06 | 6.08E−05 | 2.82E−06 |
| 17 | 3.39E−06 | 1.43E−06 | 6.08E−05 | 2.82E−06 |
| 18 | 3.39E−06 | 1.43E−06 | 6.08E−05 | 2.82E−06 |
| 19 | 3.39E−06 | 1.43E−06 | 6.08E−05 | 2.82E−06 |
| 20 | 3.39E−06 | 1.43E−06 | 6.08E−05 | 2.82E−06 |
| 21 | 5.45E−06 | 1.43E−06 | 6.08E−05 | 4.40E−06 |
| 22 | 3.39E−06 | 1.43E−06 | 6.08E−05 | 2.82E−06 |
| 23 | 3.39E−06 | 1.43E−06 | 6.08E−05 | 2.82E−06 |
| 24 | 3.39E−06 | 1.43E−06 | 6.08E−05 | 2.82E−06 |
| 25 | 3.39E−06 | 1.43E−06 | 6.08E−05 | 2.82E−06 |
| 26 | 3.39E−06 | 1.43E−06 | 6.08E−05 | 2.82E−06 |
| 27 | 3.39E−06 | 1.43E−06 | 6.08E−05 | 2.82E−06 |
| 28 | 3.39E−06 | 1.43E−06 | 6.08E−05 | 2.82E−06 |
| 29 | 3.39E−06 | 1.43E−06 | 6.08E−05 | 2.82E−06 |
| 30 | 3.39E−06 | 1.43E−06 | 6.08E−05 | 2.82E−06 |
| 31 | 3.39E−06 | 1.43E−06 | 6.08E−05 | 2.82E−06 |
| 32 | 3.39E−06 | 1.43E−06 | 6.08E−05 | 2.82E−06 |
| 33 | 3.39E−06 | 1.43E−06 | 6.08E−05 | 2.82E−06 |
| 34 | 3.39E−06 | 1.43E−06 | 6.08E−05 | 2.82E−06 |
| 35 | 3.39E−06 | 1.43E−06 | 6.08E−05 | 2.82E−06 |
| 36 | 3.39E−06 | 1.43E−06 | 6.08E−05 | 2.82E−06 |
| 37 | 3.39E−06 | 1.43E−06 | 6.08E−05 | 2.82E−06 |
| 38 | 3.39E−06 | 1.43E−06 | 6.08E−05 | 2.82E−06 |
| 39 | 4.54E−05 | 8.81E−07 | 4.61E−04 | 1.26E−05 |
| 40 | 3.39E−06 | 1.43E−06 | 6.08E−05 | 2.82E−06 |
| 41 | 3.39E−06 | 1.43E−06 | 6.08E−05 | 2.82E−06 |
| 42 | 3.39E−06 | 1.43E−06 | 6.08E−05 | 2.82E−06 |
| 43 | 3.39E−06 | 1.43E−06 | 6.08E−05 | 2.82E−06 |
| 44 | 3.39E−06 | 1.43E−06 | 6.08E−05 | 2.82E−06 |
| 45 | 3.39E−06 | 1.43E−06 | 6.08E−05 | 2.82E−06 |
| 46 | 3.39E−06 | 1.43E−06 | 6.08E−05 | 2.82E−06 |
| 47 | 5.45E−06 | 1.43E−06 | 6.08E−05 | 4.40E−06 |
| 48 | 1.60E−03 | 2.08E−05 | 4.47E−04 | 7.97E−06 |
| 49 | 3.39E−06 | 7.10E−06 | 6.19E−05 | 2.82E−06 |
| 50 | 3.39E−06 | 1.43E−06 | 6.08E−05 | 2.82E−06 |

TABLE 13f
Data for Proteus species (continued)

| | | | | |
|---|---|---|---|---|
| No. | Locus.Tag | Gene.Symbol | GenBank.Accession | Chromosome |

| | | |
|---|---|---|
| 1 | PROPEN_00658 | ZP_03802316 |
| 2 | PROPEN_02821 | ZP_03804437 |
| 3 | PROPEN_02837 | ZP_03804453 |
| 4 | PROPEN_01744 | ZP_03803381 |
| 5 | PROPEN_04772 | ZP_03806369 |
| 6 | PROPEN_00566 | ZP_03802226 |
| 7 | PROPEN_00937 | ZP_03802594 |
| 8 | PMI0230 | YP_002150011 |
| 9 | PROPEN_01382 | ZP_03803029 |
| 10 | PROPEN_04308 | ZP_03805908 |
| 11 | PROPEN_03726 | ZP_03805332 |
| 12 | PROPEN_00113 | ZP_03801788 |
| 13 | PROPEN_04501 | ZP_03806101 |
| 14 | PROPEN_02952 | ZP_03804567 |
| 15 | PROPEN_03365 | ZP_03804978 |
| 16 | PMI3610 | YP_002153285 |
| 17 | PROPEN_01429 | ZP_03803076 |
| 18 | HMPREF0693_2570 | ZP_03841679 |
| 19 | PROPEN_04448 | ZP_03806048 |
| 20 | PROPEN_04169 | ZP_03805774 |
| 21 | PROPEN_04170 | ZP_03805775 |
| 22 | PROPEN_01358 | ZP_03803005 |
| 23 | PROPEN_02831 | ZP_03804447 |
| 24 | PROPEN_03253 | ZP_03804866 |
| 25 | PROPEN_03536 | ZP_03805144 |
| 26 | PROPEN_03368 | ZP_03804981 |
| 27 | PROPEN_03235 | ZP_03804848 |
| 28 | PROPEN_03484 | ZP_03805093 |
| 29 | PMI3521 | YP_002153198 |
| 30 | PROPEN_00908 | ZP_03802565 |
| 31 | PROPEN_00654 | ZP_03802312 |
| 32 | PROPEN_03299 | ZP_03804912 |
| 33 | PROPEN_03648 | ZP_03805254 |
| 34 | PROPEN_01652 | ZP_03803297 |
| 35 | PROPEN_01314 | ZP_03802961 |
| 36 | PROPEN_02647 | ZP_03804265 |
| 37 | PROPEN_02468 | ZP_03804091 |
| 38 | PROPEN_03281 | ZP_03804894 |
| 39 | PMI0234 | YP_002150015 |
| 40 | PROPEN_00544 | ZP_03802209 |
| 41 | PROPEN_00500 | ZP_03802168 |
| 42 | PROPEN_02930 | ZP_03804546 |
| 43 | PROPEN_00758 | ZP_03802416 |
| 44 | PROPEN_01810 | ZP_03803447 |
| 45 | PROPEN_04133 | ZP_03805738 |
| 46 | PROPEN_02599 | ZP_03804222 |
| 47 | PROPEN_01149 | ZP_03802800 |
| 48 | HMPREF0693_3224 | ZP_03842333 |
| 49 | PMI3023 | YP_002152722 |
| 50 | PROPEN_01623 | ZP_03803268 |

TABLE 13g
Data for Proteus species (continued)

| No. | Start.Coord | End.Coord | Strand | Scaffold.ID |
|---|---|---|---|---|
| 1 | 42080 | 42412 | + | 643889140 |
| 2 | 185454 | 186779 | − | 643889145 |
| 3 | 201544 | 202038 | + | 643889145 |
| 4 | 122639 | 124333 | − | 643889143 |
| 5 | 853119 | 853544 | + | 643889146 |
| 6 | 57621 | 58505 | − | 643889139 |
| 7 | 44265 | 45014 | + | 643889141 |
| 8 | 273673 | 274467 | + | 642555123 |
| 9 | 115768 | 116316 | − | 643889142 |
| 10 | 495434 | 496444 | − | 643889146 |
| 11 | 53270 | 53875 | − | 643889146 |
| 12 | 28708 | 29421 | − | 643889134 |
| 13 | 639163 | 640215 | − | 643889146 |
| 14 | 285467 | 286066 | − | 643889145 |
| 15 | 601755 | 602153 | − | 643889145 |
| 16 | 3948188 | 3948604 | − | 642555123 |
| 17 | 160792 | 161340 | + | 643889142 |
| 18 | 122510 | 123433 | − | 643905827 |
| 19 | 593048 | 593632 | − | 643889146 |
| 20 | 390159 | 391736 | + | 643889146 |
| 21 | 391736 | 392329 | + | 643889146 |
| 22 | 99554 | 100063 | − | 643889142 |
| 23 | 195059 | 197509 | − | 643889145 |
| 24 | 511254 | 511508 | − | 643889145 |
| 25 | 711617 | 713044 | + | 643889145 |
| 26 | 603518 | 605086 | − | 643889145 |
| 27 | 500249 | 500962 | + | 643889145 |
| 28 | 676951 | 677898 | − | 643889145 |
| 29 | 3840767 | 3841663 | − | 642555123 |
| 30 | 23566 | 24027 | − | 643889141 |
| 31 | 39429 | 39599 | + | 643889140 |
| 32 | 548639 | 549616 | − | 643889145 |
| 33 | 797158 | 797820 | + | 643889145 |
| 34 | 48570 | 49238 | − | 643889143 |
| 35 | 63033 | 63515 | + | 643889142 |
| 36 | 56690 | 57196 | − | 643889145 |
| 37 | 284519 | 287461 | + | 643889144 |
| 38 | 535246 | 536289 | + | 643889145 |
| 39 | 279605 | 281008 | + | 642555123 |
| 40 | 44077 | 44439 | − | 643889139 |
| 41 | 12698 | 14710 | − | 643889139 |
| 42 | 268387 | 269874 | − | 643889145 |
| 43 | 106241 | 106837 | − | 643889140 |
| 44 | 175312 | 176142 | + | 643889143 |
| 45 | 362809 | 363438 | + | 643889146 |
| 46 | 23652 | 24185 | + | 643889145 |
| 47 | 200043 | 201293 | − | 643889141 |
| 48 | 37235 | 38317 | − | 643905842 |
| 49 | 3320488 | 3321087 | + | 642555123 |
| 50 | 30478 | 31134 | + | 643889143 |

TABLE 14a
Data for Proteus species

| | Scaffold.External. | | |
|---|---|---|---|
| No. | Accession | Scaffold.Name | best_pv |
| 1 | NZ_ABVP01000020 | Proteus penneri ATCC 35198 P_penneri-1.1.1_Cont338: NZ_ABVP01000020 | 9.1377556355866e−62 |
| 2 | NZ_ABVP01000025 | Proteus penneri ATCC 35198 P_penneri-1.1.1_Cont344: NZ_ABVP01000025 | 9.1377556355866e−62 |
| 3 | NZ_ABVP01000025 | Proteus penneri ATCC 35198 P_penneri-1.1.1_Cont344: NZ_ABVP01000025 | 9.1377556355866e−62 |
| 4 | NZ_ABVP01000023 | Proteus penneri ATCC 35198 P_penneri-1.1.1_Cont336: NZ_ABVP01000023 | 9.1377556355866e−62 |
| 5 | NZ_ABVP01000026 | Proteus penneri ATCC 35198 P_penneri-1.1.1_Cont348: NZ_ABVP01000026 | 9.1377556355866e−62 |
| 6 | NZ_ABVP01000019 | Proteus penneri ATCC 35198 P_penneri-1.1.1_Cont6.1: NZ_ABVP01000019 | 9.1377556355866e−62 |
| 7 | NZ_ABVP01000021 | Proteus penneri ATCC 35198 P_penneri-1.1.1_Cont356: NZ_ABVP01000021 | 9.1377556355866e−62 |
| 8 | NC_010554 | Proteus mirabilis HI4320: NC_010554 | 9.1377556355866e−62 |
| 9 | NZ_ABVP01000022 | Proteus penneri ATCC 35198 P_penneri-1.1.1_Cont341: NZ_ABVP01000022 | 9.1377556355866e−62 |
| 10 | NZ_ABVP01000026 | Proteus penneri ATCC 35198 P_penneri-1.1.1_Cont348: NZ_ABVP01000026 | 9.1377556355866e−62 |
| 11 | NZ_ABVP01000026 | Proteus penneri ATCC 35198 P_penneri-1.1.1_Cont348: NZ_ABVP01000026 | 9.1377556355866e−62 |
| 12 | NZ_ABVP01000014 | Proteus penneri ATCC 35198 P_penneri-1.1.1_Cont350: NZ_ABVP01000014 | 9.1377556355866e−62 |
| 13 | NZ_ABVP01000026 | Proteus penneri ATCC 35198 P_penneri-1.1.1_Cont348: NZ_ABVP01000026 | 9.1377556355866e−62 |
| 14 | NZ_ABVP01000025 | Proteus penneri ATCC 35198 P_penneri-1.1.1_Cont344: NZ_ABVP01000025 | 9.1377556355866e−62 |
| 15 | NZ_ABVP01000025 | Proteus penneri ATCC 35198 P_penneri-1.1.1_Cont344: NZ_ABVP01000025 | 9.1377556355866e−62 |
| 16 | NC_010554 | Proteus mirabilis HI4320: NC_010554 | 9.1377556355866e−62 |
| 17 | NZ_ABVP01000022 | Proteus penneri ATCC 35198 P_penneri-1.1.1_Cont341: NZ_ABVP01000022 | 9.1377556355866e−62 |
| 18 | NZ_ACLE01000064 | Proteus mirabilis ATCC 29906 contig00088: NZ_ACLE01000064 | 9.1377556355866e−62 |
| 19 | NZ_ABVP01000026 | Proteus penneri ATCC 35198 P_penneri-1.1.1_Cont348: NZ_ABVP01000026 | 9.1377556355866e−62 |
| 20 | NZ_ABVP01000026 | Proteus penneri ATCC 35198 P_penneri-1.1.1_Cont348: NZ_ABVP01000026 | 9.1377556355866e−62 |
| 21 | NZ_ABVP01000026 | Proteus penneri ATCC 35198 P_penneri-1.1.1_Cont348: NZ_ABVP01000026 | 9.1377556355866e−62 |
| 22 | NZ_ABVP01000022 | Proteus penneri ATCC 35198 P_penneri-1.1.1_Cont341: NZ_ABVP01000022 | 9.1377556355866e−62 |
| 23 | NZ_ABVP01000025 | Proteus penneri ATCC 35198 P_penneri-1.1.1_Cont344: NZ_ABVP01000025 | 9.1377556355866e−62 |
| 24 | NZ_ABVP01000025 | Proteus penneri ATCC 35198 P_penneri-1.1.1_Cont344: NZ_ABVP01000025 | 9.1377556355866e−62 |
| 25 | NZ_ABVP01000025 | Proteus penneri ATCC 35198 P_penneri-1.1.1_Cont344: NZ_ABVP01000025 | 9.1377556355866e−62 |
| 26 | NZ_ABVP01000025 | Proteus penneri ATCC 35198 P_penneri-1.1.1_Cont344: NZ_ABVP01000025 | 9.1377556355866e−62 |
| 27 | NZ_ABVP01000025 | Proteus penneri ATCC 35198 P_penneri-1.1.1_Cont344: NZ_ABVP01000025 | 9.1377556355866e−62 |
| 28 | NZ_ABVP01000025 | Proteus penneri ATCC 35198 P_penneri-1.1.1_Cont344: NZ_ABVP01000025 | 9.1377556355866e−62 |
| 29 | NC_010554 | Proteus mirabilis HI4320: NC_010554 | 9.1377556355866e−62 |
| 30 | NZ_ABVP01000021 | Proteus penneri ATCC 35198 P_penneri-1.1.1_Cont356: NZ_ABVP01000021 | 9.1377556355866e−62 |
| 31 | NZ_ABVP01000020 | Proteus penneri ATCC 35198 P_penneri-1.1.1_Cont338: NZ_ABVP01000020 | 9.1377556355866e−62 |
| 32 | NZ_ABVP01000025 | Proteus penneri ATCC 35198 P_penneri-1.1.1_Cont344: NZ_ABVP01000025 | 9.1377556355866e−62 |
| 33 | NZ_ABVP01000025 | Proteus penneri ATCC 35198 P_penneri-1.1.1_Cont344: NZ_ABVP01000025 | 9.1377556355866e−62 |
| 34 | NZ_ABVP01000023 | Proteus penneri ATCC 35198 P_penneri-1.1.1_Cont336: NZ_ABVP01000023 | 9.1377556355866e−62 |
| 35 | NZ_ABVP01000022 | Proteus penneri ATCC 35198 P_penneri-1.1.1_Cont341: NZ_ABVP01000022 | 9.1377556355866e−62 |
| 36 | NZ_ABVP01000025 | Proteus penneri ATCC 35198 P_penneri-1.1.1_Cont344: NZ_ABVP01000025 | 9.1377556355866e−62 |
| 37 | NZ_ABVP01000024 | Proteus penneri ATCC 35198 P_penneri-1.1.1_Cont334: NZ_ABVP01000024 | 9.1377556355866e−62 |
| 38 | NZ_ABVP01000025 | Proteus penneri ATCC 35198 P_penneri-1.1.1_Cont344: NZ_ABVP01000025 | 9.1377556355866e−62 |
| 39 | NC_010554 | Proteus mirabilis HI4320: NC_010554 | 9.1377556355866e−62 |
| 40 | NZ_ABVP01000019 | Proteus penneri ATCC 35198 P_penneri-1.1.1_Cont6.1: NZ_ABVP01000019 | 9.1377556355866e−62 |
| 41 | NZ_ABVP01000019 | Proteus penneri ATCC 35198 P_penneri-1.1.1_Cont6.1: NZ_ABVP01000019 | 9.1377556355866e−62 |
| 42 | NZ_ABVP01000025 | Proteus penneri ATCC 35198 P_penneri-1.1.1_Cont344: NZ_ABVP01000025 | 9.1377556355866e−62 |
| 43 | NZ_ABVP01000020 | Proteus penneri ATCC 35198 P_penneri-1.1.1_Cont338: NZ_ABVP01000020 | 9.1377556355866e−62 |
| 44 | NZ_ABVP01000023 | Proteus penneri ATCC 35198 P_penneri-1.1.1_Cont336: NZ_ABVP01000023 | 9.1377556355866e−62 |
| 45 | NZ_ABVP01000026 | Proteus penneri ATCC 35198 P_penneri-1.1.1_Cont348: NZ_ABVP01000026 | 9.1377556355866e−62 |
| 46 | NZ_ABVP01000025 | Proteus penneri ATCC 35198 P_penneri-1.1.1_Cont344: NZ_ABVP01000025 | 9.1377556355866e−62 |
| 47 | NZ_ABVP01000021 | Proteus penneri ATCC 35198 P_penneri-1.1.1_Cont356: NZ_ABVP01000021 | 9.1377556355866e−62 |
| 48 | NZ_ACLE01000079 | Proteus mirabilis ATCC 29906 contig00105: NZ_ACLE01000079 | 9.1377556355866e−62 |
| 49 | NC_010554 | Proteus mirabilis HI4320: NC_010554 | 9.1377556355866e−62 |
| 50 | NZ_ABVP01000023 | Proteus penneri ATCC 35198 P_penneri-1.1.1_Cont336: NZ_ABVP01000023 | 9.1377556355866e−62 |

TABLE 14b
Data for Proteus species (continued)

| No. | sign_phenos | sign_phenos_class | best_pheno | best_pheno_class |
|---|---|---|---|---|
| 1 | AM; CAX; CP; CRM; GM; LVX; TO; T/S | aminoglycoside; fluoroquinolone; lactam; other | CRM | lactam |
| 2 | AM; CAX; CP; CRM; GM; LVX; TO; T/S | aminoglycoside; fluoroquinolone; lactam; other | CRM | lactam |
| 3 | AM; CAX; CP; CRM; GM; LVX; TO; T/S | aminoglycoside; fluoroquinolone; lactam; other | CRM | lactam |
| 4 | AM; CAX; CP; CRM; GM; LVX; TO; T/S | aminoglycoside; fluoroquinolone; lactam; other | CRM | lactam |
| 5 | AM; CAX; CP; CRM; GM; LVX; TO; T/S | aminoglycoside; fluoroquinolone; lactam; other | CRM | lactam |
| 6 | AM; CAX; CP; CRM; GM; LVX; TO; T/S | aminoglycoside; fluoroquinolone; lactam; other | CRM | lactam |
| 7 | AM; CAX; CP; CRM; GM; LVX; TO; T/S | aminoglycoside; fluoroquinolone; lactam; other | CRM | lactam |
| 8 | AM; CAX; CP; CRM; GM; LVX; TO; T/S | aminoglycoside; fluoroquinolone; lactam; other | CRM | lactam |
| 9 | AM; CAX; CP; CRM; GM; LVX; TO; T/S | aminoglycoside; fluoroquinolone; lactam; other | CRM | lactam |
| 10 | AM; CAX; CP; CRM; GM; LVX; TO; T/S | aminoglycoside; fluoroquinolone; lactam; other | CRM | lactam |
| 11 | AM; CAX; CP; CRM; GM; LVX; TO; T/S | aminoglycoside; fluoroquinolone; lactam; other | CRM | lactam |
| 12 | AM; CAX; CP; CRM; GM; LVX; TO; T/S | aminoglycoside; fluoroquinolone; lactam; other | CRM | lactam |
| 13 | AM; CAX; CP; CRM; GM; LVX; TO; T/S | aminoglycoside; fluoroquinolone; lactam; other | CRM | lactam |
| 14 | AM; CAX; CP; CRM; GM; LVX; TO; T/S | aminoglycoside; fluoroquinolone; lactam; other | CRM | lactam |
| 15 | AM; CAX; CP; CRM; GM; LVX; TO; T/S | aminoglycoside; fluoroquinolone; lactam; other | CRM | lactam |
| 16 | AM; CAX; CP; CRM; GM; LVX; TO; T/S | aminoglycoside; fluoroquinolone; lactam; other | CRM | lactam |
| 17 | AM; CAX; CP; CRM; GM; LVX; TO; T/S | aminoglycoside; fluoroquinolone; lactam; other | CRM | lactam |
| 18 | AM; CAX; CP; CRM; GM; LVX; TO; T/S | aminoglycoside; fluoroquinolone; lactam; other | CRM | lactam |
| 19 | AM; CAX; CP; CRM; GM; LVX; TO; T/S | aminoglycoside; fluoroquinolone; lactam; other | CRM | lactam |
| 20 | AM; CAX; CP; CRM; GM; LVX; TO; T/S | aminoglycoside; fluoroquinolone; lactam; other | CRM | lactam |
| 21 | AM; CAX; CP; CRM; GM; LVX; TO; T/S | aminoglycoside; fluoroquinolone; lactam; other | CRM | lactam |
| 22 | AM; CAX; CP; CRM; GM; LVX; TO; T/S | aminoglycoside; fluoroquinolone; lactam; other | CRM | lactam |
| 23 | AM; CAX; CP; CRM; GM; LVX; TO; T/S | aminoglycoside; fluoroquinolone; lactam; other | CRM | lactam |
| 24 | AM; CAX; CP; CRM; GM; LVX; TO; T/S | aminoglycoside; fluoroquinolone; lactam; other | CRM | lactam |
| 25 | AM; CAX; CP; CRM; GM; LVX; TO; T/S | aminoglycoside; fluoroquinolone; lactam; other | CRM | lactam |
| 26 | AM; CAX; CP; CRM; GM; LVX; TO; T/S | aminoglycoside; fluoroquinolone; lactam; other | CRM | lactam |
| 27 | AM; CAX; CP; CRM; GM; LVX; TO; T/S | aminoglycoside; fluoroquinolone; lactam; other | CRM | lactam |
| 28 | AM; CAX; CP; CRM; GM; LVX; TO; T/S | aminoglycoside; fluoroquinolone; lactam; other | CRM | lactam |
| 29 | AM; CAX; CP; CRM; GM; LVX; TO; T/S | aminoglycoside; fluoroquinolone; lactam; other | CRM | lactam |
| 30 | AM; CAX; CP; CRM; GM; LVX; TO; T/S | aminoglycoside; fluoroquinolone; lactam; other | CRM | lactam |
| 31 | AM; CAX; CP; CRM; GM; LVX; TO; T/S | aminoglycoside; fluoroquinolone; lactam; other | CRM | lactam |
| 32 | AM; CAX; CP; CRM; GM; LVX; TO; T/S | aminoglycoside; fluoroquinolone; lactam; other | CRM | lactam |
| 33 | AM; CAX; CP; CRM; GM; LVX; TO; T/S | aminoglycoside; fluoroquinolone; lactam; other | CRM | lactam |
| 34 | AM; CAX; CP; CRM; GM; LVX; TO; T/S | aminoglycoside; fluoroquinolone; lactam; other | CRM | lactam |
| 35 | AM; CAX; CP; CRM; GM; LVX; TO; T/S | aminoglycoside; fluoroquinolone; lactam; other | CRM | lactam |
| 36 | AM; CAX; CP; CRM; GM; LVX; TO; T/S | aminoglycoside; fluoroquinolone; lactam; other | CRM | lactam |
| 37 | AM; CAX; CP; CRM; GM; LVX; TO; T/S | aminoglycoside; fluoroquinolone; lactam; other | CRM | lactam |
| 38 | AM; CAX; CP; CRM; GM; LVX; TO; T/S | aminoglycoside; fluoroquinolone; lactam; other | CRM | lactam |
| 39 | AM; CAX; CP; CRM; GM; LVX; TO; T/S | aminoglycoside; fluoroquinolone; lactam; other | CRM | lactam |
| 40 | AM; CAX; CP; CRM; GM; LVX; TO; T/S | aminoglycoside; fluoroquinolone; lactam; other | CRM | lactam |
| 41 | AM; CAX; CP; CRM; GM; LVX; TO; T/S | aminoglycoside; fluoroquinolone; lactam; other | CRM | lactam |
| 42 | AM; CAX; CP; CRM; GM; LVX; TO; T/S | aminoglycoside; fluoroquinolone; lactam; other | CRM | lactam |
| 43 | AM; CAX; CP; CRM; GM; LVX; TO; T/S | aminoglycoside; fluoroquinolone; lactam; other | CRM | lactam |
| 44 | AM; CAX; CP; CRM; GM; LVX; TO; T/S | aminoglycoside; fluoroquinolone; lactam; other | CRM | lactam |
| 45 | AM; CAX; CP; CRM; GM; LVX; TO; T/S | aminoglycoside; fluoroquinolone; lactam; other | CRM | lactam |
| 46 | AM; CAX; CP; CRM; GM; LVX; TO; T/S | aminoglycoside; fluoroquinolone; lactam; other | CRM | lactam |
| 47 | AM; CAX; CP; CRM; GM; LVX; TO; T/S | aminoglycoside; fluoroquinolone; lactam; other | CRM | lactam |
| 48 | AM; CAX; CP; CRM; GM; LVX; TO; T/S | aminoglycoside; fluoroquinolone; lactam; other | CRM | lactam |
| 49 | AM; CAX; CP; CRM; GM; LVX; TO; T/S | aminoglycoside; fluoroquinolone; lactam; other | CRM | lactam |
| 50 | AM; CAX; CP; CRM; GM; LVX; TO; T/S | aminoglycoside; fluoroquinolone; lactam; other | CRM | lactam |

TABLE 14c
Data for Proteus species (continued)

| No. | num_aminoglycoside | num_fluoroquinolone | num_lactam | num_other |
|---|---|---|---|---|
| 1 | 2 | 2 | 3 | 1 |
| 2 | 2 | 2 | 3 | 1 |
| 3 | 2 | 2 | 3 | 1 |
| 4 | 2 | 2 | 3 | 1 |
| 5 | 2 | 2 | 3 | 1 |
| 6 | 2 | 2 | 3 | 1 |
| 7 | 2 | 2 | 3 | 1 |
| 8 | 2 | 2 | 3 | 1 |
| 9 | 2 | 2 | 3 | 1 |
| 10 | 2 | 2 | 3 | 1 |
| 11 | 2 | 2 | 3 | 1 |
| 12 | 2 | 2 | 3 | 1 |
| 13 | 2 | 2 | 3 | 1 |
| 14 | 2 | 2 | 3 | 1 |
| 15 | 2 | 2 | 3 | 1 |
| 16 | 2 | 2 | 3 | 1 |
| 17 | 2 | 2 | 3 | 1 |
| 18 | 2 | 2 | 3 | 1 |
| 19 | 2 | 2 | 3 | 1 |
| 20 | 2 | 2 | 3 | 1 |
| 21 | 2 | 2 | 3 | 1 |
| 22 | 2 | 2 | 3 | 1 |
| 23 | 2 | 2 | 3 | 1 |
| 24 | 2 | 2 | 3 | 1 |
| 25 | 2 | 2 | 3 | 1 |
| 26 | 2 | 2 | 3 | 1 |
| 27 | 2 | 2 | 3 | 1 |
| 28 | 2 | 2 | 3 | 1 |
| 29 | 2 | 2 | 3 | 1 |
| 30 | 2 | 2 | 3 | 1 |
| 31 | 2 | 2 | 3 | 1 |
| 32 | 2 | 2 | 3 | 1 |
| 33 | 2 | 2 | 3 | 1 |
| 34 | 2 | 2 | 3 | 1 |
| 35 | 2 | 2 | 3 | 1 |
| 36 | 2 | 2 | 3 | 1 |
| 37 | 2 | 2 | 3 | 1 |
| 38 | 2 | 2 | 3 | 1 |
| 39 | 2 | 2 | 3 | 1 |
| 40 | 2 | 2 | 3 | 1 |
| 41 | 2 | 2 | 3 | 1 |
| 42 | 2 | 2 | 3 | 1 |
| 43 | 2 | 2 | 3 | 1 |
| 44 | 2 | 2 | 3 | 1 |
| 45 | 2 | 2 | 3 | 1 |
| 46 | 2 | 2 | 3 | 1 |
| 47 | 2 | 2 | 3 | 1 |
| 48 | 2 | 2 | 3 | 1 |
| 49 | 2 | 2 | 3 | 1 |
| 50 | 2 | 2 | 3 | 1 |

TABLE 14d
Data for Proteus species (continued)

| No. | AM_pv_adj | A/S_pv_adj | CAX_pv_adj | CP_pv_adj | CRM_pv_adj |
|---|---|---|---|---|---|
| 1 | 3.94E−36 | 1 | 1.38E−16 | 1.03E−08 | 9.14E−62 |
| 2 | 3.94E−36 | 1 | 1.38E−16 | 1.03E−08 | 9.14E−62 |
| 3 | 3.94E−36 | 1 | 1.38E−16 | 1.03E−08 | 9.14E−62 |
| 4 | 3.94E−36 | 1 | 1.38E−16 | 1.03E−08 | 9.14E−62 |
| 5 | 3.94E−36 | 1 | 1.38E−16 | 1.03E−08 | 9.14E−62 |
| 6 | 3.94E−36 | 1 | 1.38E−16 | 1.03E−08 | 9.14E−62 |
| 7 | 3.94E−36 | 1 | 1.38E−16 | 1.03E−08 | 9.14E−62 |
| 8 | 5.45E−37 | 9.36E−01 | 4.09E−17 | 7.21E−08 | 9.14E−62 |
| 9 | 3.94E−36 | 1 | 1.38E−16 | 1.03E−08 | 9.14E−62 |
| 10 | 3.94E−36 | 1 | 1.38E−16 | 1.03E−08 | 9.14E−62 |
| 11 | 3.94E−36 | 1 | 1.38E−16 | 1.03E−08 | 9.14E−62 |
| 12 | 3.94E−36 | 1 | 1.38E−16 | 1.03E−08 | 9.14E−62 |
| 13 | 3.94E−36 | 1 | 1.38E−16 | 1.03E−08 | 9.14E−62 |
| 14 | 3.94E−36 | 1 | 1.38E−16 | 1.03E−08 | 9.14E−62 |
| 15 | 3.94E−36 | 1 | 1.38E−16 | 1.03E−08 | 9.14E−62 |
| 16 | 3.94E−36 | 1 | 1.38E−16 | 1.03E−08 | 9.14E−62 |
| 17 | 3.94E−36 | 1 | 1.38E−16 | 1.03E−08 | 9.14E−62 |
| 18 | 3.94E−36 | 1 | 1.38E−16 | 1.03E−08 | 9.14E−62 |
| 19 | 3.94E−36 | 1 | 1.38E−16 | 1.03E−08 | 9.14E−62 |
| 20 | 3.94E−36 | 1 | 1.38E−16 | 1.03E−08 | 9.14E−62 |
| 21 | 1.07E−35 | 9.36E−01 | 8.67E−17 | 1.70E−08 | 9.14E−62 |
| 22 | 3.94E−36 | 1 | 1.38E−16 | 1.03E−08 | 9.14E−62 |
| 23 | 3.94E−36 | 1 | 1.38E−16 | 1.03E−08 | 9.14E−62 |
| 24 | 3.94E−36 | 1 | 1.38E−16 | 1.03E−08 | 9.14E−62 |
| 25 | 3.94E−36 | 1 | 1.38E−16 | 1.03E−08 | 9.14E−62 |
| 26 | 3.94E−36 | 1 | 1.38E−16 | 1.03E−08 | 9.14E−62 |
| 27 | 3.94E−36 | 1 | 1.38E−16 | 1.03E−08 | 9.14E−62 |
| 28 | 3.94E−36 | 1 | 1.38E−16 | 1.03E−08 | 9.14E−62 |
| 29 | 3.94E−36 | 1 | 1.38E−16 | 1.03E−08 | 9.14E−62 |
| 30 | 3.94E−36 | 1 | 1.38E−16 | 1.03E−08 | 9.14E−62 |
| 31 | 3.94E−36 | 1 | 1.38E−16 | 1.03E−08 | 9.14E−62 |
| 32 | 3.94E−36 | 1 | 1.38E−16 | 1.03E−08 | 9.14E−62 |
| 33 | 3.94E−36 | 1 | 1.38E−16 | 1.03E−08 | 9.14E−62 |
| 34 | 3.94E−36 | 1 | 1.38E−16 | 1.03E−08 | 9.14E−62 |
| 35 | 3.94E−36 | 1 | 1.38E−16 | 1.03E−08 | 9.14E−62 |
| 36 | 3.94E−36 | 1 | 1.38E−16 | 1.03E−08 | 9.14E−62 |
| 37 | 3.94E−36 | 1 | 1.38E−16 | 1.03E−08 | 9.14E−62 |
| 38 | 3.94E−36 | 1 | 1.38E−16 | 1.03E−08 | 9.14E−62 |
| 39 | 5.45E−37 | 9.36E−01 | 4.09E−17 | 6.06E−09 | 9.14E−62 |
| 40 | 3.94E−36 | 1 | 1.38E−16 | 1.03E−08 | 9.14E−62 |
| 41 | 3.94E−36 | 1 | 1.38E−16 | 1.03E−08 | 9.14E−62 |
| 42 | 3.94E−36 | 1 | 1.38E−16 | 1.03E−08 | 9.14E−62 |
| 43 | 3.94E−36 | 1 | 1.38E−16 | 1.03E−08 | 9.14E−62 |
| 44 | 3.94E−36 | 1 | 1.38E−16 | 1.03E−08 | 9.14E−62 |
| 45 | 3.94E−36 | 1 | 1.38E−16 | 1.03E−08 | 9.14E−62 |
| 46 | 3.94E−36 | 1 | 1.38E−16 | 1.03E−08 | 9.14E−62 |
| 47 | 1.07E−35 | 9.36E−01 | 8.67E−17 | 1.70E−08 | 9.14E−62 |
| 48 | 6.31E−38 | 5.69E−01 | 1.13E−16 | 4.44E−07 | 9.14E−62 |
| 49 | 1.56E−36 | 8.45E−01 | 2.42E−17 | 1.26E−07 | 9.14E−62 |
| 50 | 3.94E−36 | 1 | 1.38E−16 | 1.03E−08 | 9.14E−62 |

TABLE 14e
Data for Proteus species (continued)

| No. | GM_pv_adj | LVX_pv_adj | TO_pv_adj | T/S_pv_adj |
|---|---|---|---|---|
| 1 | 3.39E−06 | 1.43E−06 | 6.08E−05 | 2.82E−06 |
| 2 | 3.39E−06 | 1.43E−06 | 6.08E−05 | 2.82E−06 |
| 3 | 3.39E−06 | 1.43E−06 | 6.08E−05 | 2.82E−06 |
| 4 | 3.39E−06 | 1.43E−06 | 6.08E−05 | 2.82E−06 |
| 5 | 3.39E−06 | 1.43E−06 | 6.08E−05 | 2.82E−06 |
| 6 | 3.39E−06 | 1.43E−06 | 6.08E−05 | 2.82E−06 |
| 7 | 3.39E−06 | 1.43E−06 | 6.08E−05 | 2.82E−06 |
| 8 | 4.54E−05 | 4.64E−06 | 3.83E−05 | 1.26E−05 |
| 9 | 3.39E−06 | 1.43E−06 | 6.08E−05 | 2.82E−06 |
| 10 | 3.39E−06 | 1.43E−06 | 6.08E−05 | 2.82E−06 |
| 11 | 3.39E−06 | 1.43E−06 | 6.08E−05 | 2.82E−06 |
| 12 | 3.39E−06 | 1.43E−06 | 6.08E−05 | 2.82E−06 |
| 13 | 3.39E−06 | 1.43E−06 | 6.08E−05 | 2.82E−06 |
| 14 | 3.39E−06 | 1.43E−06 | 6.08E−05 | 2.82E−06 |
| 15 | 3.39E−06 | 1.43E−06 | 6.08E−05 | 2.82E−06 |
| 16 | 3.39E−06 | 1.43E−06 | 6.08E−05 | 2.82E−06 |
| 17 | 3.39E−06 | 1.43E−06 | 6.08E−05 | 2.82E−06 |
| 18 | 3.39E−06 | 1.43E−06 | 6.08E−05 | 2.82E−06 |
| 19 | 3.39E−06 | 1.43E−06 | 6.08E−05 | 2.82E−06 |
| 20 | 3.39E−06 | 1.43E−06 | 6.08E−05 | 2.82E−06 |
| 21 | 5.45E−06 | 1.43E−06 | 6.08E−05 | 4.40E−06 |
| 22 | 3.39E−06 | 1.43E−06 | 6.08E−05 | 2.82E−06 |
| 23 | 3.39E−06 | 1.43E−06 | 6.08E−05 | 2.82E−06 |
| 24 | 3.39E−06 | 1.43E−06 | 6.08E−05 | 2.82E−06 |
| 25 | 3.39E−06 | 1.43E−06 | 6.08E−05 | 2.82E−06 |
| 26 | 3.39E−06 | 1.43E−06 | 6.08E−05 | 2.82E−06 |
| 27 | 3.39E−06 | 1.43E−06 | 6.08E−05 | 2.82E−06 |
| 28 | 3.39E−06 | 1.43E−06 | 6.08E−05 | 2.82E−06 |
| 29 | 3.39E−06 | 1.43E−06 | 6.08E−05 | 2.82E−06 |
| 30 | 3.39E−06 | 1.43E−06 | 6.08E−05 | 2.82E−06 |
| 31 | 3.39E−06 | 1.43E−06 | 6.08E−05 | 2.82E−06 |
| 32 | 3.39E−06 | 1.43E−06 | 6.08E−05 | 2.82E−06 |
| 33 | 3.39E−06 | 1.43E−06 | 6.08E−05 | 2.82E−06 |
| 34 | 3.39E−06 | 1.43E−06 | 6.08E−05 | 2.82E−06 |
| 35 | 3.39E−06 | 1.43E−06 | 6.08E−05 | 2.82E−06 |
| 36 | 3.39E−06 | 1.43E−06 | 6.08E−05 | 2.82E−06 |
| 37 | 3.39E−06 | 1.43E−06 | 6.08E−05 | 2.82E−06 |
| 38 | 3.39E−06 | 1.43E−06 | 6.08E−05 | 2.82E−06 |
| 39 | 4.54E−05 | 8.81E−07 | 4.61E−04 | 1.26E−05 |
| 40 | 3.39E−06 | 1.43E−06 | 6.08E−05 | 2.82E−06 |
| 41 | 3.39E−06 | 1.43E−06 | 6.08E−05 | 2.82E−06 |
| 42 | 3.39E−06 | 1.43E−06 | 6.08E−05 | 2.82E−06 |
| 43 | 3.39E−06 | 1.43E−06 | 6.08E−05 | 2.82E−06 |
| 44 | 3.39E−06 | 1.43E−06 | 6.08E−05 | 2.82E−06 |
| 45 | 3.39E−06 | 1.43E−06 | 6.08E−05 | 2.82E−06 |
| 46 | 3.39E−06 | 1.43E−06 | 6.08E−05 | 2.82E−06 |
| 47 | 5.45E−06 | 1.43E−06 | 6.08E−05 | 4.40E−06 |
| 48 | 1.60E−03 | 2.08E−05 | 4.47E−04 | 7.97E−06 |
| 49 | 3.39E−06 | 7.10E−06 | 6.19E−05 | 2.82E−06 |
| 50 | 3.39E−06 | 1.43E−06 | 6.08E−05 | 2.82E−06 |

TABLE 14f
Data for Proteus species (continued)

| | | | | |
|---|---|---|---|---|
| No. | Locus.Tag | Gene.Symbol | GenBank.Accession | Chromosome |

| | | |
|---|---|---|
| 1 | PROPEN_00658 | ZP_03802316 |
| 2 | PROPEN_02821 | ZP_03804437 |
| 3 | PROPEN_02837 | ZP_03804453 |
| 4 | PROPEN_01744 | ZP_03803381 |
| 5 | PROPEN_04772 | ZP_03806369 |
| 6 | PROPEN_00566 | ZP_03802226 |
| 7 | PROPEN_00937 | ZP_03802594 |
| 8 | PMI0230 | YP_002150011 |
| 9 | PROPEN_01382 | ZP_03803029 |
| 10 | PROPEN_04308 | ZP_03805908 |
| 11 | PROPEN_03726 | ZP_03805332 |
| 12 | PROPEN_00113 | ZP_03801788 |
| 13 | PROPEN_04501 | ZP_03806101 |
| 14 | PROPEN_02952 | ZP_03804567 |
| 15 | PROPEN_03365 | ZP_03804978 |
| 16 | PMI3610 | YP_002153285 |
| 17 | PROPEN_01429 | ZP_03803076 |
| 18 | HMPREF0693_2570 | ZP_03841679 |
| 19 | PROPEN_04448 | ZP_03806048 |
| 20 | PROPEN_04169 | ZP_03805774 |
| 21 | PROPEN_04170 | ZP_03805775 |
| 22 | PROPEN_01358 | ZP_03803005 |
| 23 | PROPEN_02831 | ZP_03804447 |
| 24 | PROPEN_03253 | ZP_03804866 |
| 25 | PROPEN_03536 | ZP_03805144 |
| 26 | PROPEN_03368 | ZP_03804981 |
| 27 | PROPEN_03235 | ZP_03804848 |
| 28 | PROPEN_03484 | ZP_03805093 |
| 29 | PMI3521 | YP_002153198 |
| 30 | PROPEN_00908 | ZP_03802565 |
| 31 | PROPEN_00654 | ZP_03802312 |
| 32 | PROPEN_03299 | ZP_03804912 |
| 33 | PROPEN_03648 | ZP_03805254 |
| 34 | PROPEN_01652 | ZP_03803297 |
| 35 | PROPEN_01314 | ZP_03802961 |
| 36 | PROPEN_02647 | ZP_03804265 |
| 37 | PROPEN_02468 | ZP_03804091 |
| 38 | PROPEN_03281 | ZP_03804894 |
| 39 | PMI0234 | YP_002150015 |
| 40 | PROPEN_00544 | ZP_03802209 |
| 41 | PROPEN_00500 | ZP_03802168 |
| 42 | PROPEN_02930 | ZP_03804546 |
| 43 | PROPEN_00758 | ZP_03802416 |
| 44 | PROPEN_01810 | ZP_03803447 |
| 45 | PROPEN_04133 | ZP_03805738 |
| 46 | PROPEN_02599 | ZP_03804222 |
| 47 | PROPEN_01149 | ZP_03802800 |
| 48 | HMPREF0693_3224 | ZP_03842333 |
| 49 | PMI3023 | YP_002152722 |
| 50 | PROPEN_01623 | ZP_03803268 |

TABLE 14g
Data for Proteus species (continued)

| No. | Start.Coord | End.Coord | Strand | Scaffold.ID |
|---|---|---|---|---|
| 1 | 42080 | 42412 | + | 643889140 |
| 2 | 185454 | 186779 | − | 643889145 |
| 3 | 201544 | 202038 | + | 643889145 |
| 4 | 122639 | 124333 | − | 643889143 |
| 5 | 853119 | 853544 | + | 643889146 |
| 6 | 57621 | 58505 | − | 643889139 |
| 7 | 44265 | 45014 | + | 643889141 |
| 8 | 273673 | 274467 | + | 642555123 |
| 9 | 115768 | 116316 | − | 643889142 |
| 10 | 495434 | 496444 | − | 643889146 |
| 11 | 53270 | 53875 | − | 643889146 |
| 12 | 28708 | 29421 | − | 643889134 |
| 13 | 639163 | 640215 | − | 643889146 |
| 14 | 285467 | 286066 | − | 643889145 |
| 15 | 601755 | 602153 | − | 643889145 |
| 16 | 3948188 | 3948604 | − | 642555123 |
| 17 | 160792 | 161340 | + | 643889142 |
| 18 | 122510 | 123433 | − | 643905827 |
| 19 | 593048 | 593632 | − | 643889146 |
| 20 | 390159 | 391736 | + | 643889146 |
| 21 | 391736 | 392329 | + | 643889146 |
| 22 | 99554 | 100063 | − | 643889142 |
| 23 | 195059 | 197509 | − | 643889145 |
| 24 | 511254 | 511508 | − | 643889145 |
| 25 | 711617 | 713044 | + | 643889145 |
| 26 | 603518 | 605086 | − | 643889145 |
| 27 | 500249 | 500962 | + | 643889145 |
| 28 | 676951 | 677898 | − | 643889145 |
| 29 | 3840767 | 3841663 | − | 642555123 |
| 30 | 23566 | 24027 | − | 643889141 |
| 31 | 39429 | 39599 | + | 643889140 |
| 32 | 548639 | 549616 | − | 643889145 |
| 33 | 797158 | 797820 | + | 643889145 |
| 34 | 48570 | 49238 | − | 643889143 |
| 35 | 63033 | 63515 | + | 643889142 |
| 36 | 56690 | 57196 | − | 643889145 |
| 37 | 284519 | 287461 | + | 643889144 |
| 38 | 535246 | 536289 | + | 643889145 |
| 39 | 279605 | 281008 | + | 642555123 |
| 40 | 44077 | 44439 | − | 643889139 |
| 41 | 12698 | 14710 | − | 643889139 |
| 42 | 268387 | 269874 | − | 643889145 |
| 43 | 106241 | 106837 | − | 643889140 |
| 44 | 175312 | 176142 | + | 643889143 |
| 45 | 362809 | 363438 | + | 643889146 |
| 46 | 23652 | 24185 | + | 643889145 |
| 47 | 200043 | 201293 | − | 643889141 |
| 48 | 37235 | 38317 | − | 643905842 |
| 49 | 3320488 | 3321087 | + | 642555123 |
| 50 | 30478 | 31134 | + | 643889143 |

### Example 8

### Pseudomonas, particularly P. aeruginosa

[0272] The procedure was carried out as in Example 1, except that the following microorganisms were used:

[0273] Bacterial Strains

[0274] The inventors selected 1042 Pseudomonas strains, particularly Pseudomonas aeruginosa, from the microbiology strain collection at Siemens Healthcare Diagnostics (West Sacramento, Calif.) for susceptibility testing and whole genome sequencing.

[0275] From MetaRef, 640 centroids of Pseudomonas aeruginosa were used as reference sequences.

[0276] The results for P. aeruginosa are shown in Tables 15 (corresponding to Table 1) and 16 (corresponding to Table 2).

TABLE 15a
Data for Pseudomonas, particularly Pseudomonas aeruginosa

| | Scaffold.External. | | |
|---|---|---|---|
| No. | Accession | Scaffold.Name | best_pv |
| 1 | NC_009656 | Pseudomonas aeruginosa PA7: NC_009656 | 4.52939243363163e−78 |
| 2 | NC_009656 | Pseudomonas aeruginosa PA7: NC_009656 | 2.75541175953672e−58 |
| 3 | NZ_AEEX01000100 | Pseudomonas aeruginosa 39016 contig00116: NZ_AEEX01000100 | 4.23483908607088e−28 |
| 4 | NC_010501 | Pseudomonas putida W619: NC_010501 | 2.9087092265635e−26 |
| 5 | NC_009656 | Pseudomonas aeruginosa PA7: NC_009656 | 5.61705273260437e−22 |
| 6 | NC_015740 | Pseudomonas stutzeri ATCC 17588 = LMG 11199 chromosome: NC_015740 | 5.61705273260437e−22 |
| 7 | NC_015733 | Pseudomonas putida S16 chromosome: NC_015733 | 1.91188334380809e−20 |
| 8 | NZ_AEEX01000148 | Pseudomonas aeruginosa 39016 contig00164: NZ_AEEX01000148 | 4.25099609715652e−20 |
| 9 | NZ_AAKV01000030 | Pseudomonas aeruginosa C3719, unfinished sequence: NZ_AAKV01000030 | 2.79764535555464e−19 |
| 10 | NZ_AEEX01000098 | Pseudomonas aeruginosa 39016 contig00114: NZ_AEEX01000098 | 4.15595600170243e−19 |
| 11 | NZ_AEEX01000163 | Pseudomonas aeruginosa 39016 contig00179: NZ_AEEX01000163 | 4.72113166087411e−19 |
| 12 | NZ_AAKW01000042 | Pseudomonas aeruginosa 2192, unfinished sequence: NZ_AAKW01000042 | 2.33370938002383e−17 |
| 13 | NZ_AEEX01000009 | Pseudomonas aeruginosa 39016 contig00011: NZ_AEEX01000009 | 3.60022886576205e−17 |
| 14 | NZ_AAKW01000075 | Pseudomonas aeruginosa 2192, unfinished sequence: NZ_AAKW01000075 | 1.13322970340506e−14 |
| 15 | NC_009656 | Pseudomonas aeruginosa PA7: NC_009656 | 2.33016029331653e−14 |
| 16 | NC_009656 | Pseudomonas aeruginosa PA7: NC_009656 | 2.33822187391836e−14 |
| 17 | NZ_AEEX01000098 | Pseudomonas aeruginosa 39016 contig00114: NZ_AEEX01000098 | 2.91419614855849e−14 |
| 18 | NC_009656 | Pseudomonas aeruginosa PA7: NC_009656 | 5.5018212149287e−14 |
| 19 | NC_010501 | Pseudomonas putida W619: NC_010501 | 6.06970436387873e−14 |
| 20 | NC_009656 | Pseudomonas aeruginosa PA7: NC_009656 | 7.75377932078369e−14 |
| 21 | NZ_AAKW01000022 | Pseudomonas aeruginosa 2192, unfinished sequence: NZ_AAKW01000022 | 3.34337634494896e−13 |
| 22 | NZ_ABKZ01000250 | Pseudomonas aeruginosa PAb1 NZ_ABKZ01000250: NZ_ABKZ01000250 | 6.17495854397665e−13 |
| 23 | NC_008463 | Pseudomonas aeruginosa UCBPP-PA14: NC_008463 | 6.42896969501816e−13 |
| 24 | NZ_AAKW01000022 | Pseudomonas aeruginosa 2192, unfinished sequence: NZ_AAKW01000022 | 1.20774339924326e−12 |
| 25 | NZ_AAQW01000001 | Pseudomonas aeruginosa PACS2, unfinished sequence: NZ_AAQW01000001 | 1.22221957191107e−12 |
| 26 | NC_011770 | Pseudomonas aeruginosa LESB58: NC_011770 | 1.79185026742242e−12 |
| 27 | NZ_AAQW01000001 | Pseudomonas aeruginosa PACS2, unfinished sequence: NZ_AAQW01000001 | 2.12378785336506e−12 |
| 28 | NZ_AAKW01000022 | Pseudomonas aeruginosa 2192, unfinished sequence: NZ_AAKW01000022 | 2.4812070369021e−12 |
| 29 | NC_009656 | Pseudomonas aeruginosa PA7: NC_009656 | 3.74499379826048e−12 |
| 30 | NZ_AEEX01000148 | Pseudomonas aeruginosa 39016 contig00164: NZ_AEEX01000148 | 4.42748938639645e−12 |
| 31 | NC_008463 | Pseudomonas aeruginosa UCBPP-PA14: NC_008463 | 5.32658560222593e−12 |
| 32 | NZ_AAQW01000001 | Pseudomonas aeruginosa PACS2, unfinished sequence: NZ_AAQW01000001 | 5.99725940121888e−12 |
| 33 | NC_009656 | Pseudomonas aeruginosa PA7: NC_009656 | 7.28057447109574e−12 |
| 34 | NC_009656 | Pseudomonas aeruginosa PA7: NC_009656 | 7.48144363663932e−12 |
| 35 | NZ_AAKW01000022 | Pseudomonas aeruginosa 2192, unfinished sequence: NZ_AAKW01000022 | 9.72376870484031e−12 |
| 36 | NZ_AEEX01000085 | Pseudomonas aeruginosa 39016 contig00101: NZ_AEEX01000085 | 9.72376870484031e−12 |
| 37 | NZ_AAQW01000001 | Pseudomonas aeruginosa PACS2, unfinished sequence: NZ_AAQW01000001 | 9.72376870484031e−12 |
| 38 | NZ_AAQW01000001 | Pseudomonas aeruginosa PACS2, unfinished sequence: NZ_AAQW01000001 | 9.72376870484031e−12 |
| 39 | NZ_AAKW01000022 | Pseudomonas aeruginosa 2192, unfinished sequence: NZ_AAKW01000022 | 9.73896479060769e−12 |
| 40 | NC_011770 | Pseudomonas aeruginosa LESB58: NC_011770 | 9.73896479060769e−12 |
| 41 | CP002622 | Pseudomonas stutzeri DSM 4166: CP002622 | 9.73896479060769e−12 |
| 42 | NZ_AAQW01000001 | Pseudomonas aeruginosa PACS2, unfinished sequence: NZ_AAQW01000001 | 9.73896479060769e−12 |
| 43 | NZ_AEEX01000149 | Pseudomonas aeruginosa 39016 contig00165: NZ_AEEX01000149 | 1.05759735249337e−11 |
| 44 | NZ_AEEX01000149 | Pseudomonas aeruginosa 39016 contig00165: NZ_AEEX01000149 | 1.05759735249337e−11 |
| 45 | NC_008463 | Pseudomonas aeruginosa UCBPP-PA14: NC_008463 | 1.05759735249337e−11 |
| 46 | NZ_AAKW01000024 | Pseudomonas aeruginosa 2192, unfinished sequence: NZ_AAKW01000024 | 1.13412272447338e−11 |
| 47 | NZ_AAKW01000022 | Pseudomonas aeruginosa 2192, unfinished sequence: NZ_AAKW01000022 | 1.64096469464127e−11 |
| 48 | NC_012560 | Azotobacter vinelandii DJ: NC_012560 | 1.85224764530357e−11 |
| 49 | NZ_AEEX01000149 | Pseudomonas aeruginosa 39016 contig00165: NZ_AEEX01000149 | 1.86265894165925e−11 |
| 50 | NC_009656 | Pseudomonas aeruginosa PA7: NC_009656 | 1.8721278417616e−11 |

TABLE 15b
Data for Pseudomonas, particularly Pseudomonas aeruginosa (continued)

| No. | sign_phenos | sign_phenos_class | best_pheno | best_pheno_class |
|---|---|---|---|---|
| 1 | AZT; CAZ; CP; CPE; GM; IMP; LVX; MER; | aminoglycoside; fluoroquinolone; lactam | TO | aminoglycoside |
| | P/T; TO | | | |
| 2 | AZT; CAZ; CP; CPE; GM; IMP; LVX; MER; | aminoglycoside; fluoroquinolone; lactam | TO | aminoglycoside |
| | P/T; TO | | | |
| 3 | CP; CPE; GM; LVX; P/T; TO | aminoglycoside; fluoroquinolone; lactam | TO | aminoglycoside |
| 4 | CP; CPE; GM; LVX; P/T; TO | aminoglycoside; fluoroquinolone; lactam | TO | aminoglycoside |
| 5 | CP; GM; LVX; TO | aminoglycoside; fluoroquinolone | TO | aminoglycoside |
| 6 | CP; GM; LVX; TO | aminoglycoside; fluoroquinolone | TO | aminoglycoside |
| 7 | CP; GM; LVX; TO | aminoglycoside; fluoroquinolone | TO | aminoglycoside |
| 8 | CP; GM; LVX; MER; P/T; TO | aminoglycoside; fluoroquinolone; lactam | TO | aminoglycoside |
| 9 | CAZ; CP; CPE; GM; LVX; MER; P/T; TO | aminoglycoside; fluoroquinolone; lactam | TO | aminoglycoside |
| 10 | CP; GM; TO | aminoglycoside; fluoroquinolone | TO | aminoglycoside |
| 11 | AZT; CAZ; CP; CPE; GM; LVX; P/T; TO | aminoglycoside; fluoroquinolone; lactam | TO | aminoglycoside |
| 12 | CAZ; CP; CPE; GM; LVX; P/T; TO | aminoglycoside; fluoroquinolone; lactam | TO | aminoglycoside |
| 13 | AZT; CAZ; CP; CPE; GM; LVX; P/T; TO | aminoglycoside; fluoroquinolone; lactam | TO | aminoglycoside |
| 14 | CP; GM; LVX; TO | aminoglycoside; fluoroquinolone | TO | aminoglycoside |
| 15 | CAZ; CP; CPE; GM; LVX; P/T; TO | aminoglycoside; fluoroquinolone; lactam | TO | aminoglycoside |
| 16 | CP; GM; IMP; LVX; MER; TO | aminoglycoside; fluoroquinolone; lactam | TO | aminoglycoside |
| 17 | CP; GM; TO | aminoglycoside; fluoroquinolone | TO | aminoglycoside |
| 18 | CAZ; CP; CPE; GM; LVX; P/T; TO | aminoglycoside; fluoroquinolone; lactam | TO | aminoglycoside |
| 19 | CP; GM; LVX; TO | aminoglycoside; fluoroquinolone | TO | aminoglycoside |
| 20 | CP; GM; LVX; TO | aminoglycoside; fluoroquinolone | TO | aminoglycoside |
| 21 | CAZ; CP; GM; MER; P/T; TO | aminoglycoside; fluoroquinolone; lactam | TO | aminoglycoside |
| 22 | CP; GM; IMP; LVX; MER; TO | aminoglycoside; fluoroquinolone; lactam | TO | aminoglycoside |
| 23 | CP; GM; TO | aminoglycoside; fluoroquinolone | TO | aminoglycoside |
| 24 | CAZ; CP; GM; MER; P/T; TO | aminoglycoside; fluoroquinolone; lactam | TO | aminoglycoside |
| 25 | CAZ; CP; GM; LVX; MER; P/T; TO | aminoglycoside; fluoroquinolone; lactam | TO | aminoglycoside |
| 26 | CAZ; CP; GM; LVX; MER; P/T; TO | aminoglycoside; fluoroquinolone; lactam | TO | aminoglycoside |
| 27 | CAZ; CP; GM; LVX; MER; P/T; TO | aminoglycoside; fluoroquinolone; lactam | TO | aminoglycoside |
| 28 | CP; GM; TO | aminoglycoside; fluoroquinolone | TO | aminoglycoside |
| 29 | CP; CPE; GM; LVX; P/T; TO | aminoglycoside; fluoroquinolone; lactam | TO | aminoglycoside |
| 30 | CP; GM; IMP; LVX; MER; TO | aminoglycoside; fluoroquinolone; lactam | TO | aminoglycoside |
| 31 | AZT; CAZ; CP; CPE; GM; LVX; P/T; TO | aminoglycoside; fluoroquinolone; lactam | TO | aminoglycoside |
| 32 | CAZ; CP; GM; LVX; MER; TO | aminoglycoside; fluoroquinolone; lactam | TO | aminoglycoside |
| 33 | CP; GM; IMP; LVX; MER; TO | aminoglycoside; fluoroquinolone; lactam | TO | aminoglycoside |
| 34 | CAZ; CP; CPE; GM; P/T; TO | aminoglycoside; fluoroquinolone; lactam | TO | aminoglycoside |
| 35 | CAZ; CP; GM; LVX; MER; P/T; TO | aminoglycoside; fluoroquinolone; lactam | TO | aminoglycoside |
| 36 | CAZ; CP; GM; LVX; MER; P/T; TO | aminoglycoside; fluoroquinolone; lactam | TO | aminoglycoside |
| 37 | CAZ; CP; GM; LVX; MER; P/T; TO | aminoglycoside; fluoroquinolone; lactam | TO | aminoglycoside |
| 38 | CAZ; CP; GM; LVX; MER; TO | aminoglycoside; fluoroquinolone; lactam | TO | aminoglycoside |
| 39 | CAZ; CP; GM; LVX; MER; P/T; TO | aminoglycoside; fluoroquinolone; lactam | TO | aminoglycoside |
| 40 | CAZ; CP; GM; LVX; MER; TO | aminoglycoside; fluoroquinolone; lactam | TO | aminoglycoside |
| 41 | CAZ; CP; GM; LVX; MER; P/T; TO | aminoglycoside; fluoroquinolone; lactam | TO | aminoglycoside |
| 42 | CAZ; CP; GM; LVX; MER; P/T; TO | aminoglycoside; fluoroquinolone; lactam | TO | aminoglycoside |
| 43 | CP; GM; IMP; LVX; TO | aminoglycoside; fluoroquinolone; lactam | TO | aminoglycoside |
| 44 | CP; GM; IMP; LVX; MER; TO | aminoglycoside; fluoroquinolone; lactam | TO | aminoglycoside |
| 45 | CP; GM; IMP; LVX; MER; TO | aminoglycoside; fluoroquinolone; lactam | TO | aminoglycoside |
| 46 | CP; GM; IMP; LVX; MER; TO | aminoglycoside; fluoroquinolone; lactam | TO | aminoglycoside |
| 47 | CAZ; CP; GM; LVX; MER; TO | aminoglycoside; fluoroquinolone; lactam | TO | aminoglycoside |
| 48 | CP; GM; IMP; LVX; MER; TO | aminoglycoside; fluoroquinolone; lactam | TO | aminoglycoside |
| 49 | CP; GM; IMP; LVX; MER; TO | aminoglycoside; fluoroquinolone; lactam | TO | aminoglycoside |
| 50 | CP; GM; IMP; LVX; TO | aminoglycoside; fluoroquinolone; lactam | TO | aminoglycoside |

TABLE 15c
Data for Pseudomonas, particularly Pseudomonas aeruginosa
(continued)

| No. | num_aminoglycoside | num_fluoroquinolone | num_lactam |
|---|---|---|---|
| 1 | 2 | 2 | 6 |
| 2 | 2 | 2 | 6 |
| 3 | 2 | 2 | 2 |
| 4 | 2 | 2 | 2 |
| 5 | 2 | 2 | 0 |
| 6 | 2 | 2 | 0 |
| 7 | 2 | 2 | 0 |
| 8 | 2 | 2 | 2 |
| 9 | 2 | 2 | 4 |
| 10 | 2 | 1 | 0 |
| 11 | 2 | 2 | 4 |
| 12 | 2 | 2 | 3 |
| 13 | 2 | 2 | 4 |
| 14 | 2 | 2 | 0 |
| 15 | 2 | 2 | 3 |
| 16 | 2 | 2 | 2 |
| 17 | 2 | 1 | 0 |
| 18 | 2 | 2 | 3 |
| 19 | 2 | 2 | 0 |
| 20 | 2 | 2 | 0 |
| 21 | 2 | 1 | 3 |
| 22 | 2 | 2 | 2 |
| 23 | 2 | 1 | 0 |
| 24 | 2 | 1 | 3 |
| 25 | 2 | 2 | 3 |
| 26 | 2 | 2 | 3 |
| 27 | 2 | 2 | 3 |
| 28 | 2 | 1 | 0 |
| 29 | 2 | 2 | 2 |
| 30 | 2 | 2 | 2 |
| 31 | 2 | 2 | 4 |
| 32 | 2 | 2 | 2 |
| 33 | 2 | 2 | 2 |
| 34 | 2 | 1 | 3 |
| 35 | 2 | 2 | 3 |
| 36 | 2 | 2 | 3 |
| 37 | 2 | 2 | 3 |
| 38 | 2 | 2 | 2 |
| 39 | 2 | 2 | 3 |
| 40 | 2 | 2 | 2 |
| 41 | 2 | 2 | 3 |
| 42 | 2 | 2 | 3 |
| 43 | 2 | 2 | 1 |
| 44 | 2 | 2 | 2 |
| 45 | 2 | 2 | 2 |
| 46 | 2 | 2 | 2 |
| 47 | 2 | 2 | 2 |
| 48 | 2 | 2 | 2 |
| 49 | 2 | 2 | 2 |
| 50 | 2 | 2 | 1 |

TABLE 15d
Data for Pseudomonas, particularly Pseudomonas aeruginosa (continued)

| No. | AZT_pv_adj | CAZ_pv_adj | CP_pv_adj | CPE_pv_adj | GM_pv_adj |
|---|---|---|---|---|---|
| 1 | 4.68E−03 | 2.31E−09 | 4.27E−32 | 5.83E−17 | 1.14E−56 |
| 2 | 1.88E−03 | 1.86E−08 | 3.37E−28 | 4.30E−16 | 2.05E−42 |
| 3 | 4.88E−01 | 1.79E−02 | 4.13E−10 | 4.41E−04 | 7.91E−18 |
| 4 | 5.97E−01 | 1.23E−02 | 2.07E−09 | 2.52E−04 | 9.24E−17 |
| 5 | 5.49E−01 | 5.49E−01 | 9.07E−06 | 1.26E−01 | 1.33E−11 |
| 6 | 5.49E−01 | 5.49E−01 | 9.07E−06 | 1.26E−01 | 1.33E−11 |
| 7 | 6.66E−01 | 3.70E−01 | 9.33E−05 | 1.41E−01 | 5.53E−11 |
| 8 | 9.33E−01 | 6.81E−02 | 1.30E−09 | 3.20E−02 | 9.74E−12 |
| 9 | 2.57E−01 | 3.98E−05 | 1.63E−09 | 1.56E−07 | 6.24E−16 |
| 10 | 7.47E−01 | 4.36E−01 | 2.70E−04 | 2.27E−01 | 5.68E−10 |
| 11 | 4.31E−03 | 4.22E−08 | 3.91E−13 | 2.77E−09 | 7.84E−16 |
| 12 | 3.06E−02 | 6.75E−05 | 1.29E−09 | 9.32E−06 | 1.77E−14 |
| 13 | 2.11E−03 | 3.40E−07 | 3.34E−10 | 7.91E−07 | 4.31E−14 |
| 14 | 6.90E−01 | 3.88E−02 | 8.36E−06 | 2.05E−02 | 1.97E−09 |
| 15 | 1.08E−01 | 8.48E−04 | 2.11E−07 | 1.99E−04 | 4.46E−13 |
| 16 | 8.07E−01 | 4.16E−02 | 3.85E−08 | 3.59E−02 | 1.19E−09 |
| 17 | 6.52E−01 | 4.40E−01 | 1.90E−04 | 5.44E−01 | 1.07E−07 |
| 18 | 1.20E−02 | 1.84E−06 | 1.64E−08 | 1.64E−07 | 4.99E−11 |
| 19 | 4.08E−01 | 1.28E−02 | 2.37E−05 | 3.15E−02 | 2.20E−09 |
| 20 | 9.48E−01 | 6.78E−02 | 9.58E−07 | 3.17E−02 | 1.32E−09 |
| 21 | 5.47E−01 | 9.24E−03 | 2.24E−04 | 5.63E−02 | 4.24E−08 |
| 22 | 8.08E−01 | 1.43E−01 | 2.42E−06 | 2.48E−01 | 1.01E−07 |
| 23 | 8.44E−01 | 2.48E−01 | 4.61E−04 | 3.25E−01 | 9.75E−07 |
| 24 | 4.14E−01 | 4.37E−03 | 1.78E−04 | 5.65E−02 | 1.49E−07 |
| 25 | 3.25E−01 | 1.51E−03 | 6.15E−05 | 2.63E−02 | 9.67E−08 |
| 26 | 6.54E−01 | 5.11E−03 | 1.38E−05 | 1.82E−02 | 5.63E−08 |
| 27 | 1.63E−01 | 1.65E−04 | 7.86E−05 | 1.59E−02 | 1.34E−09 |
| 28 | 7.69E−01 | 2.48E−01 | 7.44E−04 | 3.25E−01 | 2.80E−06 |
| 29 | 4.44E−01 | 6.54E−02 | 4.51E−05 | 8.97E−06 | 1.56E−07 |
| 30 | 9.82E−01 | 1.63E−01 | 3.28E−06 | 2.73E−01 | 2.89E−08 |
| 31 | 7.11E−03 | 2.08E−05 | 1.73E−08 | 1.31E−06 | 7.90E−09 |
| 32 | 4.78E−01 | 7.49E−03 | 4.49E−05 | 2.57E−02 | 2.96E−07 |
| 33 | 6.55E−01 | 1.81E−01 | 8.24E−06 | 2.97E−01 | 2.97E−07 |
| 34 | 5.00E−01 | 5.68E−03 | 8.53E−03 | 7.20E−03 | 1.63E−11 |
| 35 | 4.77E−01 | 4.27E−03 | 6.00E−05 | 2.17E−02 | 9.67E−08 |
| 36 | 4.77E−01 | 4.27E−03 | 6.00E−05 | 2.17E−02 | 9.67E−08 |
| 37 | 4.77E−01 | 4.27E−03 | 6.00E−05 | 2.17E−02 | 9.67E−08 |
| 38 | 5.46E−01 | 9.06E−03 | 6.00E−05 | 3.01E−02 | 2.03E−07 |
| 39 | 4.78E−01 | 4.34E−03 | 1.28E−04 | 2.20E−02 | 1.35E−07 |
| 40 | 5.47E−01 | 9.22E−03 | 7.62E−05 | 3.04E−02 | 2.83E−07 |
| 41 | 4.78E−01 | 4.34E−03 | 1.28E−04 | 2.20E−02 | 1.35E−07 |
| 42 | 4.78E−01 | 4.34E−03 | 1.28E−04 | 2.20E−02 | 1.35E−07 |
| 43 | 1 | 1.81E−01 | 8.55E−06 | 2.01E−01 | 4.71E−07 |
| 44 | 9.49E−01 | 1.43E−01 | 2.47E−06 | 2.48E−01 | 2.19E−07 |
| 45 | 1 | 1.12E−01 | 4.65E−06 | 2.01E−01 | 2.19E−07 |
| 46 | 9.82E−01 | 4.90E−02 | 6.77E−07 | 7.55E−02 | 2.07E−07 |
| 47 | 4.78E−01 | 7.49E−03 | 7.54E−05 | 2.57E−02 | 2.96E−07 |
| 48 | 9.49E−01 | 1.44E−01 | 6.20E−06 | 2.48E−01 | 4.67E−07 |
| 49 | 9.82E−01 | 1.43E−01 | 2.41E−06 | 1.62E−01 | 6.60E−07 |
| 50 | 7.30E−01 | 2.71E−01 | 1.97E−05 | 4.14E−01 | 1.33E−06 |

TABLE 15e
Data for Pseudomonas, particularly Pseudomonas aeruginosa (continued)

| No. | IMP_pv_adj | LVX_pv_adj | MER_pv_adj | P/T_pv_adj | TO_pv_adj |
|---|---|---|---|---|---|
| 1 | 1.35E−04 | 9.50E−27 | 2.29E−10 | 3.68E−18 | 4.53E−78 |
| 2 | 3.88E−03 | 4.29E−23 | 1.88E−05 | 3.33E−17 | 2.76E−58 |
| 3 | 4.33E−01 | 1.56E−06 | 1.57E−01 | 7.34E−04 | 4.23E−28 |
| 4 | 3.93E−01 | 4.01E−06 | 1.33E−01 | 9.25E−04 | 2.91E−26 |
| 5 | 2.74E−01 | 1.86E−03 | 8.61E−02 | 3.50E−01 | 5.62E−22 |
| 6 | 2.74E−01 | 1.86E−03 | 8.61E−02 | 3.50E−01 | 5.62E−22 |
| 7 | 5.97E−01 | 7.47E−03 | 1.01E−01 | 4.09E−01 | 1.91E−20 |
| 8 | 4.04E−02 | 2.96E−08 | 8.12E−03 | 3.01E−03 | 4.25E−20 |
| 9 | 4.48E−01 | 4.75E−07 | 8.35E−03 | 1.95E−05 | 2.80E−19 |
| 10 | 8.37E−01 | 1.48E−02 | 2.27E−01 | 4.37E−01 | 4.16E−19 |
| 11 | 1 | 7.77E−10 | 2.74E−02 | 2.06E−06 | 4.72E−19 |
| 12 | 8.04E−01 | 2.34E−06 | 1.05E−01 | 5.83E−04 | 2.33E−17 |
| 13 | 1 | 1.18E−06 | 1.82E−01 | 5.92E−05 | 3.60E−17 |
| 14 | 2.13E−02 | 2.85E−04 | 4.99E−01 | 1.04E−02 | 1.13E−14 |
| 15 | 4.16E−01 | 1.60E−05 | 4.41E−01 | 1.42E−03 | 2.33E−14 |
| 16 | 1.11E−03 | 7.44E−05 | 3.68E−04 | 1.33E−02 | 2.34E−14 |
| 17 | 4.55E−01 | 3.37E−02 | 3.01E−01 | 5.40E−01 | 2.91E−14 |
| 18 | 9.48E−01 | 9.19E−07 | 1.68E−01 | 5.53E−05 | 5.50E−14 |
| 19 | 1 | 1.24E−03 | 2.34E−01 | 1.09E−01 | 6.07E−14 |
| 20 | 1.05E−02 | 1.87E−04 | 2.63E−01 | 3.01E−02 | 7.75E−14 |
| 21 | 1.13E−01 | 1.21E−02 | 5.24E−03 | 6.95E−03 | 3.34E−13 |
| 22 | 2.50E−03 | 3.35E−04 | 2.39E−03 | 1.14E−01 | 6.17E−13 |
| 23 | 9.76E−02 | 4.12E−02 | 1.60E−01 | 4.20E−01 | 6.43E−13 |
| 24 | 1.75E−01 | 1.21E−02 | 8.59E−03 | 4.17E−03 | 1.21E−12 |
| 25 | 1.31E−01 | 7.32E−03 | 6.68E−03 | 1.51E−03 | 1.22E−12 |
| 26 | 9.53E−02 | 5.07E−03 | 6.50E−03 | 9.57E−03 | 1.79E−12 |
| 27 | 1.89E−02 | 8.78E−03 | 1.36E−04 | 3.10E−04 | 2.12E−12 |
| 28 | 1.14E−01 | 4.77E−02 | 1.85E−01 | 4.19E−01 | 2.48E−12 |
| 29 | 3.21E−02 | 1.60E−05 | 3.06E−01 | 2.70E−04 | 3.74E−12 |
| 30 | 4.18E−03 | 1.07E−03 | 6.72E−03 | 1.01E−01 | 4.43E−12 |
| 31 | 8.38E−01 | 7.16E−05 | 2.64E−01 | 1.39E−03 | 5.33E−12 |
| 32 | 6.86E−02 | 3.50E−03 | 3.93E−03 | 1.13E−02 | 6.00E−12 |
| 33 | 5.18E−03 | 1.07E−03 | 8.59E−03 | 1.13E−01 | 7.28E−12 |
| 34 | 9.58E−01 | 1.06E−02 | 1.47E−01 | 6.26E−03 | 7.48E−12 |
| 35 | 8.10E−02 | 4.28E−03 | 4.05E−03 | 8.08E−03 | 9.72E−12 |
| 36 | 8.10E−02 | 4.28E−03 | 4.05E−03 | 8.08E−03 | 9.72E−12 |
| 37 | 8.10E−02 | 4.28E−03 | 4.05E−03 | 8.08E−03 | 9.72E−12 |
| 38 | 8.10E−02 | 4.28E−03 | 4.05E−03 | 1.56E−02 | 9.72E−12 |
| 39 | 8.13E−02 | 7.24E−03 | 5.04E−03 | 9.57E−03 | 9.74E−12 |
| 40 | 8.13E−02 | 5.09E−03 | 5.04E−03 | 1.83E−02 | 9.74E−12 |
| 41 | 8.13E−02 | 7.24E−03 | 5.04E−03 | 9.57E−03 | 9.74E−12 |
| 42 | 8.13E−02 | 7.24E−03 | 5.04E−03 | 9.57E−03 | 9.74E−12 |
| 43 | 4.13E−03 | 1.98E−03 | 1.07E−02 | 1.29E−01 | 1.06E−11 |
| 44 | 2.49E−03 | 1.32E−03 | 4.07E−03 | 1.01E−01 | 1.06E−11 |
| 45 | 2.49E−03 | 1.98E−03 | 4.07E−03 | 7.86E−02 | 1.06E−11 |
| 46 | 6.61E−03 | 1.62E−03 | 6.66E−03 | 3.47E−02 | 1.13E−11 |
| 47 | 6.86E−02 | 5.04E−03 | 3.93E−03 | 1.56E−02 | 1.64E−11 |
| 48 | 1.92E−03 | 1.62E−03 | 5.24E−03 | 1.28E−01 | 1.85E−11 |
| 49 | 3.22E−03 | 1.08E−03 | 6.76E−03 | 7.83E−02 | 1.86E−11 |
| 50 | 6.52E−03 | 4.34E−03 | 1.32E−02 | 2.40E−01 | 1.87E−11 |

TABLE 15f
Data for Pseudomonas, particularly Pseudomonas aeruginosa (continued)

| | | | | |
|---|---|---|---|---|
| No. | Locus.Tag | Gene.Symbol | GenBank.Accession | Chromosome |

| | | | |
|---|---|---|---|
| 1 | PSPA7_5342 | | YP_001350673 |
| 2 | PSPA7_5335 | | YP_001350666 |
| 3 | PA39016_001160000 | | ZP_07794022 |
| 4 | PputW619_2322 | | YP_001749191 |
| 5 | PSPA7_0102 | | YP_001345498 |
| 6 | PSTAB_1238 | merR | YP_004713608 |
| 7 | PPS_5233 | | YP_004704640 |
| 8 | PA39016_001640030 | | ZP_07794960 |
| 9 | PaerC_01001712 | | ZP_00968897 |
| 10 | PA39016_001140033 | | ZP_07794005 |
| 11 | PA39016_001790028 | | ZP_07795388 |
| 12 | Paer2_01003738 | | ZP_00973073 |
| 13 | PA39016_000110208 | | ZP_07792174 |
| 14 | Paer2_01005870 | | ZP_00970967 |
| 15 | PSPA7_0117 | | YP_001345513 |
| 16 | PSPA7_3727 | | YP_001349081 |
| 17 | PA39016_001140034 | | ZP_07794006 |
| 18 | PSPA7_5254 | | YP_001350586 |
| 19 | PputW619_2321 | | YP_001749190 |
| 20 | PSPA7_4822 | | YP_001350163 |
| 21 | Paer2_01002125 | | ZP_00974743 |
| 22 | PaerPAb_010100012576 | | ZP_06878458 |
| 23 | PA14_15470 | merP | YP_789375 |
| 24 | Paer2_01002118 | | ZP_00974736 |
| 25 | PaerPA_01003088 | | ZP_01365958 |
| 26 | PLES_26911 | | YP_002440283 |
| 27 | PaerPA_01003092 | | ZP_01365962 |
| 28 | Paer2_01002142 | | ZP_00974760 |
| 29 | PSPA7_0357 | | YP_001345752 |
| 30 | PA39016_001640027 | | ZP_07794957 |
| 31 | PA14_49520 | pyoS3A | YP_792115 |
| 32 | PaerPA_01003114 | | ZP_01365983 |
| 33 | PSPA7_3718 | | YP_001349072 |
| 34 | PSPA7_0113 | merP1 | YP_001345509 |
| 35 | Paer2_01002136 | | ZP_00974754 |
| 36 | PA39016_001010047 | | ZP_07793693 |
| 37 | PaerPA_01003095 | | ZP_01365965 |
| 38 | PaerPA_01003132 | | ZP_01366001 |
| 39 | Paer2_01002121 | | ZP_00974739 |
| 40 | PLES_26591 | | YP_002440252 |
| 41 | PSTAA_1280 | | AEA83190 |
| 42 | PaerPA_01003094 | | ZP_01365964 |
| 43 | PA39016_001650006 | | ZP_07794967 |
| 44 | PA39016_001650001 | | ZP_07794962 |
| 45 | PA14_30900 | | YP_790630 |
| 46 | Paer2_01002387 | | ZP_00974497 |
| 47 | Paer2_01002180 | | ZP_00974798 |
| 48 | Avin_35690 | trbE | YP_002800691 |
| 49 | PA39016_001650003 | | ZP_07794964 |
| 50 | PSPA7_3698 | | YP_001349052 |

TABLE 15g
Data for Pseudomonas, particularly Pseudomonas aeruginosa (continued)

| No. | Start.Coord | End.Coord | Strand | Scaffold.ID |
|---|---|---|---|---|
| 1 | 5509888 | 5510901 | + | 640753026 |
| 2 | 5497616 | 5498380 | − | 640753026 |
| 3 | 269 | 829 | + | 649999021 |
| 4 | 2600850 | 2601410 | − | 641522670 |
| 5 | 112316 | 112732 | + | 640753026 |
| 6 | 1298354 | 1298788 | + | 650716170 |
| 7 | 5930458 | 5930823 | − | 650716164 |
| 8 | 29403 | 29642 | − | 649999069 |
| 9 | 9109 | 10122 | − | 638362473 |
| 10 | 35241 | 35606 | − | 649999019 |
| 11 | 25607 | 28270 | + | 649999084 |
| 12 | 18240 | 19688 | − | 638362609 |
| 13 | 212874 | 213821 | − | 649998930 |
| 14 | 22370 | 34666 | + | 638362642 |
| 15 | 122819 | 123664 | + | 640753026 |
| 16 | 3864574 | 3865185 | − | 640753026 |
| 17 | 35624 | 37309 | − | 649999019 |
| 18 | 5409448 | 5411001 | − | 640753026 |
| 19 | 2597880 | 2600846 | − | 641522670 |
| 20 | 4961575 | 4962753 | − | 640753026 |
| 21 | 167495 | 167935 | + | 638362589 |
| 22 | 28 | 241 | − | 647002430 |
| 23 | 1310460 | 1310735 | − | 639279323 |
| 24 | 161059 | 161934 | + | 638362589 |
| 25 | 3500513 | 3501292 | + | 638372930 |
| 26 | 2885013 | 2885837 | − | 643348637 |
| 27 | 3505406 | 3506134 | + | 638372930 |
| 28 | 182786 | 184474 | + | 638362589 |
| 29 | 366452 | 367480 | − | 640753026 |
| 30 | 26408 | 27688 | − | 649999069 |
| 31 | 4403159 | 4405534 | − | 639279323 |
| 32 | 3528459 | 3529049 | + | 638372930 |
| 33 | 3855983 | 3856195 | − | 640753026 |
| 34 | 121405 | 121680 | − | 640753026 |
| 35 | 179158 | 179895 | + | 638362589 |
| 36 | 48194 | 50227 | + | 649999006 |
| 37 | 3507452 | 3509473 | + | 638372930 |
| 38 | 3547764 | 3548102 | + | 638372930 |
| 39 | 163874 | 164434 | + | 638362589 |
| 40 | 2856655 | 2857038 | − | 643348637 |
| 41 | 1367161 | 1367601 | − | 651053081 |
| 42 | 3506732 | 3507172 | + | 638372930 |
| 43 | 6653 | 8650 | − | 649999070 |
| 44 | 2001 | 4451 | − | 649999070 |
| 45 | 2683111 | 2683836 | − | 639279323 |
| 46 | 138340 | 138654 | − | 638362591 |
| 47 | 214185 | 216386 | + | 638362589 |
| 48 | 3640230 | 3642680 | − | 643692060 |
| 49 | 4730 | 5116 | − | 649999070 |
| 50 | 3833901 | 3834893 | − | 640753026 |

TABLE 16a
Data for Pseudomonas, particularly Pseudomonas aeruginosa

| No. | Scaffold.External.Accession | Scaffold.Name | best_pv |
|---|---|---|---|
| 1 | NC_009656 | Pseudomonas aeruginosa PA7: NC_009656 | 4.52939243363163e−78 |
| 2 | NC_009656 | Pseudomonas aeruginosa PA7: NC_009656 | 2.75541175953672e−58 |
| 3 | NZ_AEEX01000100 | Pseudomonas aeruginosa 39016 contig00116: NZ_AEEX01000100 | 4.23483908607088e−28 |
| 4 | NC_010501 | Pseudomonas putida W619: NC_010501 | 2.9087092265635e−26 |
| 5 | NC_009656 | Pseudomonas aeruginosa PA7: NC_009656 | 5.61705273260437e−22 |
| 6 | NC_015740 | Pseudomonas stutzeri ATCC 17588 = LMG 11199 chromosome: NC_015740 | 5.61705273260437e−22 |
| 7 | NC_015733 | Pseudomonas putida S16 chromosome: NC_015733 | 1.91188334380809e−20 |
| 8 | NZ_AEEX01000148 | Pseudomonas aeruginosa 39016 contig00164: NZ_AEEX01000148 | 4.25099609715652e−20 |
| 9 | NZ_AAKV01000030 | Pseudomonas aeruginosa C3719, unfinished sequence: NZ_AAKV01000030 | 2.79764535555464e−19 |
| 10 | NZ_AEEX01000098 | Pseudomonas aeruginosa 39016 contig00114: NZ_AEEX01000098 | 4.15595600170243e−19 |
| 11 | NZ_AEEX01000163 | Pseudomonas aeruginosa 39016 contig00179: NZ_AEEX01000163 | 4.72113166087411e−19 |
| 12 | NZ_AAKW01000042 | Pseudomonas aeruginosa 2192, unfinished sequence: NZ_AAKW01000042 | 2.33370938002383e−17 |
| 13 | NZ_AEEX01000009 | Pseudomonas aeruginosa 39016 contig00011: NZ_AEEX01000009 | 3.60022886576205e−17 |
| 14 | NZ_AAKW01000075 | Pseudomonas aeruginosa 2192, unfinished sequence: NZ_AAKW01000075 | 1.13322970340506e−14 |
| 15 | NC_009656 | Pseudomonas aeruginosa PA7: NC_009656 | 2.33016029331653e−14 |
| 16 | NC_009656 | Pseudomonas aeruginosa PA7: NC_009656 | 2.33822187391836e−14 |
| 17 | NZ_AEEX01000098 | Pseudomonas aeruginosa 39016 contig00114: NZ_AEEX01000098 | 2.91419614855849e−14 |
| 18 | NC_009656 | Pseudomonas aeruginosa PA7: NC_009656 | 5.5018212149287e−14 |
| 19 | NC_010501 | Pseudomonas putida W619: NC_010501 | 6.06970436387873e−14 |
| 20 | NC_009656 | Pseudomonas aeruginosa PA7: NC_009656 | 7.75377932078369e−14 |
| 21 | NZ_AAKW01000022 | Pseudomonas aeruginosa 2192, unfinished sequence: NZ_AAKW01000022 | 3.34337634494896e−13 |
| 22 | NZ_ABKZ01000250 | Pseudomonas aeruginosa PAb1 NZ_ABKZ01000250: NZ_ABKZ01000250 | 6.17495854397665e−13 |
| 23 | NC_008463 | Pseudomonas aeruginosa UCBPP-PA14: NC_008463 | 6.42896969501816e−13 |
| 24 | NZ_AAKW01000022 | Pseudomonas aeruginosa 2192, unfinished sequence: NZ_AAKW01000022 | 1.20774339924326e−12 |
| 25 | NZ_AAQW01000001 | Pseudomonas aeruginosa PACS2, unfinished sequence: NZ_AAQW01000001 | 1.22221957191107e−12 |
| 26 | NC_011770 | Pseudomonas aeruginosa LESB58: NC_011770 | 1.79185026742242e−12 |
| 27 | NZ_AAQW01000001 | Pseudomonas aeruginosa PACS2, unfinished sequence: NZ_AAQW01000001 | 2.12378785336506e−12 |
| 28 | NZ_AAKW01000022 | Pseudomonas aeruginosa 2192, unfinished sequence: NZ_AAKW01000022 | 2.4812070369021e−12 |
| 29 | NC_009656 | Pseudomonas aeruginosa PA7: NC_009656 | 3.74499379826048e−12 |
| 30 | NZ_AEEX01000148 | Pseudomonas aeruginosa 39016 contig00164: NZ_AEEX01000148 | 4.42748938639645e−12 |
| 31 | NC_008463 | Pseudomonas aeruginosa UCBPP-PA14: NC_008463 | 5.32658560222593e−12 |
| 32 | NZ_AAQW01000001 | Pseudomonas aeruginosa PACS2, unfinished sequence: NZ_AAQW01000001 | 5.99725940121888e−12 |
| 33 | NC_009656 | Pseudomonas aeruginosa PA7: NC_009656 | 7.28057447109574e−12 |
| 34 | NC_009656 | Pseudomonas aeruginosa PA7: NC_009656 | 7.48144363663932e−12 |
| 35 | NZ_AAKW01000022 | Pseudomonas aeruginosa 2192, unfinished sequence: NZ_AAKW01000022 | 9.72376870484031e−12 |
| 36 | NZ_AEEX01000085 | Pseudomonas aeruginosa 39016 contig00101: NZ_AEEX01000085 | 9.72376870484031e−12 |
| 37 | NZ_AAQW01000001 | Pseudomonas aeruginosa PACS2, unfinished sequence: NZ_AAQW01000001 | 9.72376870484031e−12 |
| 38 | NZ_AAQW01000001 | Pseudomonas aeruginosa PACS2, unfinished sequence: NZ_AAQW01000001 | 9.72376870484031e−12 |
| 39 | NZ_AAKW01000022 | Pseudomonas aeruginosa 2192, unfinished sequence: NZ_AAKW01000022 | 9.73896479060769e−12 |
| 40 | NC_011770 | Pseudomonas aeruginosa LESB58: NC_011770 | 9.73896479060769e−12 |
| 41 | CP002622 | Pseudomonas stutzeri DSM 4166: CP002622 | 9.73896479060769e−12 |
| 42 | NZ_AAQW01000001 | Pseudomonas aeruginosa PACS2, unfinished sequence: NZ_AAQW01000001 | 9.73896479060769e−12 |
| 43 | NZ_AEEX01000149 | Pseudomonas aeruginosa 39016 contig00165: NZ_AEEX01000149 | 1.05759735249337e−11 |
| 44 | NZ_AEEX01000149 | Pseudomonas aeruginosa 39016 contig00165: NZ_AEEX01000149 | 1.05759735249337e−11 |
| 45 | NC_008463 | Pseudomonas aeruginosa UCBPP-PA14: NC_008463 | 1.05759735249337e−11 |
| 46 | NZ_AAKW01000024 | Pseudomonas aeruginosa 2192, unfinished sequence: NZ_AAKW01000024 | 1.13412272447338e−11 |
| 47 | NZ_AAKW01000022 | Pseudomonas aeruginosa 2192, unfinished sequence: NZ_AAKW01000022 | 1.64096469464127e−11 |
| 48 | NC_012560 | Azotobacter vinelandii DJ: NC_012560 | 1.85224764530357e−11 |
| 49 | NZ_AEEX01000149 | Pseudomonas aeruginosa 39016 contig00165: NZ_AEEX01000149 | 1.86265894165925e−11 |
| 50 | NC_009656 | Pseudomonas aeruginosa PA7: NC_009656 | 1.8721278417616e−11 |

TABLE 16b
Data for Pseudomonas, particularly Pseudomonas aeruginosa (continued)

| No. | sign_phenos | sign_phenos_class | best_pheno | best_pheno_class |
|---|---|---|---|---|
| 1 | AZT; CAZ; CP; CPE; GM; IMP; LVX; MER; | aminoglycoside; fluoroquinolone; lactam | TO | aminoglycoside |
| | P/T; TO | | | |
| 2 | AZT; CAZ; CP; CPE; GM; IMP; LVX; MER; | aminoglycoside; fluoroquinolone; lactam | TO | aminoglycoside |
| | P/T; TO | | | |
| 3 | CP; CPE; GM; LVX; P/T; TO | aminoglycoside; fluoroquinolone; lactam | TO | aminoglycoside |
| 4 | CP; CPE; GM; LVX; P/T; TO | aminoglycoside; fluoroquinolone; lactam | TO | aminoglycoside |
| 5 | CP; GM; LVX; TO | aminoglycoside; fluoroquinolone | TO | aminoglycoside |
| 6 | CP; GM; LVX; TO | aminoglycoside; fluoroquinolone | TO | aminoglycoside |
| 7 | CP; GM; LVX; TO | aminoglycoside; fluoroquinolone | TO | aminoglycoside |
| 8 | CP; GM; LVX; MER; P/T; TO | aminoglycoside; fluoroquinolone; lactam | TO | aminoglycoside |
| 9 | CAZ; CP; CPE; GM; LVX; MER; P/T; TO | aminoglycoside; fluoroquinolone; lactam | TO | aminoglycoside |
| 10 | CP; GM; TO | aminoglycoside; fluoroquinolone | TO | aminoglycoside |
| 11 | AZT; CAZ; CP; CPE; GM; LVX; P/T; TO | aminoglycoside; fluoroquinolone; lactam | TO | aminoglycoside |
| 12 | CAZ; CP; CPE; GM; LVX; P/T; TO | aminoglycoside; fluoroquinolone; lactam | TO | aminoglycoside |
| 13 | AZT; CAZ; CP; CPE; GM; LVX; P/T; TO | aminoglycoside; fluoroquinolone; lactam | TO | aminoglycoside |
| 14 | CP; GM; LVX; TO | aminoglycoside; fluoroquinolone | TO | aminoglycoside |
| 15 | CAZ; CP; CPE; GM; LVX; P/T; TO | aminoglycoside; fluoroquinolone; lactam | TO | aminoglycoside |
| 16 | CP; GM; IMP; LVX; MER; TO | aminoglycoside; fluoroquinolone; lactam | TO | aminoglycoside |
| 17 | CP; GM; TO | aminoglycoside; fluoroquinolone | TO | aminoglycoside |
| 18 | CAZ; CP; CPE; GM; LVX; P/T; TO | aminoglycoside; fluoroquinolone; lactam | TO | aminoglycoside |
| 19 | CP; GM; LVX; TO | aminoglycoside; fluoroquinolone | TO | aminoglycoside |
| 20 | CP; GM; LVX; TO | aminoglycoside; fluoroquinolone | TO | aminoglycoside |
| 21 | CAZ; CP; GM; MER; P/T; TO | aminoglycoside; fluoroquinolone; lactam | TO | aminoglycoside |
| 22 | CP; GM; IMP; LVX; MER; TO | aminoglycoside; fluoroquinolone; lactam | TO | aminoglycoside |
| 23 | CP; GM; TO | aminoglycoside; fluoroquinolone | TO | aminoglycoside |
| 24 | CAZ; CP; GM; MER; P/T; TO | aminoglycoside; fluoroquinolone; lactam | TO | aminoglycoside |
| 25 | CAZ; CP; GM; LVX; MER; P/T; TO | aminoglycoside; fluoroquinolone; lactam | TO | aminoglycoside |
| 26 | CAZ; CP; GM; LVX; MER; P/T; TO | aminoglycoside; fluoroquinolone; lactam | TO | aminoglycoside |
| 27 | CAZ; CP; GM; LVX; MER; P/T; TO | aminoglycoside; fluoroquinolone; lactam | TO | aminoglycoside |
| 28 | CP; GM; TO | aminoglycoside; fluoroquinolone | TO | aminoglycoside |
| 29 | CP; CPE; GM; LVX; P/T; TO | aminoglycoside; fluoroquinolone; lactam | TO | aminoglycoside |
| 30 | CP; GM; IMP; LVX; MER; TO | aminoglycoside; fluoroquinolone; lactam | TO | aminoglycoside |
| 31 | AZT; CAZ; CP; CPE; GM; LVX; P/T; TO | aminoglycoside; fluoroquinolone; lactam | TO | aminoglycoside |
| 32 | CAZ; CP; GM; LVX; MER; TO | aminoglycoside; fluoroquinolone; lactam | TO | aminoglycoside |
| 33 | CP; GM; IMP; LVX; MER; TO | aminoglycoside; fluoroquinolone; lactam | TO | aminoglycoside |
| 34 | CAZ; CP; CPE; GM; P/T; TO | aminoglycoside; fluoroquinolone; lactam | TO | aminoglycoside |
| 35 | CAZ; CP; GM; LVX; MER; P/T; TO | aminoglycoside; fluoroquinolone; lactam | TO | aminoglycoside |
| 36 | CAZ; CP; GM; LVX; MER; P/T; TO | aminoglycoside; fluoroquinolone; lactam | TO | aminoglycoside |
| 37 | CAZ; CP; GM; LVX; MER; P/T; TO | aminoglycoside; fluoroquinolone; lactam | TO | aminoglycoside |
| 38 | CAZ; CP; GM; LVX; MER; TO | aminoglycoside; fluoroquinolone; lactam | TO | aminoglycoside |
| 39 | CAZ; CP; GM; LVX; MER; P/T; TO | aminoglycoside; fluoroquinolone; lactam | TO | aminoglycoside |
| 40 | CAZ; CP; GM; LVX; MER; TO | aminoglycoside; fluoroquinolone; lactam | TO | aminoglycoside |
| 41 | CAZ; CP; GM; LVX; MER; P/T; TO | aminoglycoside; fluoroquinolone; lactam | TO | aminoglycoside |
| 42 | CAZ; CP; GM; LVX; MER; P/T; TO | aminoglycoside; fluoroquinolone; lactam | TO | aminoglycoside |
| 43 | CP; GM; IMP; LVX; TO | aminoglycoside; fluoroquinolone; lactam | TO | aminoglycoside |
| 44 | CP; GM; IMP; LVX; MER; TO | aminoglycoside; fluoroquinolone; lactam | TO | aminoglycoside |
| 45 | CP; GM; IMP; LVX; MER; TO | aminoglycoside; fluoroquinolone; lactam | TO | aminoglycoside |
| 46 | CP; GM; IMP; LVX; MER; TO | aminoglycoside; fluoroquinolone; lactam | TO | aminoglycoside |
| 47 | CAZ; CP; GM; LVX; MER; TO | aminoglycoside; fluoroquinolone; lactam | TO | aminoglycoside |
| 48 | CP; GM; IMP; LVX; MER; TO | aminoglycoside; fluoroquinolone; lactam | TO | aminoglycoside |
| 49 | CP; GM; IMP; LVX; MER; TO | aminoglycoside; fluoroquinolone; lactam | TO | aminoglycoside |
| 50 | CP; GM; IMP; LVX; TO | aminoglycoside; fluoroquinolone; lactam | TO | aminoglycoside |

TABLE 16c
Data for Pseudomonas, particularly Pseudomonas aeruginosa (continued)

| No. | num_aminoglycoside | num_fluoroquinolone | num_lactam |
|---|---|---|---|
| 1 | 2 | 2 | 6 |
| 2 | 2 | 2 | 6 |
| 3 | 2 | 2 | 2 |
| 4 | 2 | 2 | 2 |
| 5 | 2 | 2 | 0 |
| 6 | 2 | 2 | 0 |
| 7 | 2 | 2 | 0 |
| 8 | 2 | 2 | 2 |
| 9 | 2 | 2 | 4 |
| 10 | 2 | 1 | 0 |
| 11 | 2 | 2 | 4 |
| 12 | 2 | 2 | 3 |
| 13 | 2 | 2 | 4 |
| 14 | 2 | 2 | 0 |
| 15 | 2 | 2 | 3 |
| 16 | 2 | 2 | 2 |
| 17 | 2 | 1 | 0 |
| 18 | 2 | 2 | 3 |
| 19 | 2 | 2 | 0 |
| 20 | 2 | 2 | 0 |
| 21 | 2 | 1 | 3 |
| 22 | 2 | 2 | 2 |
| 23 | 2 | 1 | 0 |
| 24 | 2 | 1 | 3 |
| 25 | 2 | 2 | 3 |
| 26 | 2 | 2 | 3 |
| 27 | 2 | 2 | 3 |
| 28 | 2 | 1 | 0 |
| 29 | 2 | 2 | 2 |
| 30 | 2 | 2 | 2 |
| 31 | 2 | 2 | 4 |
| 32 | 2 | 2 | 2 |
| 33 | 2 | 2 | 2 |
| 34 | 2 | 1 | 3 |
| 35 | 2 | 2 | 3 |
| 36 | 2 | 2 | 3 |
| 37 | 2 | 2 | 3 |
| 38 | 2 | 2 | 2 |
| 39 | 2 | 2 | 3 |
| 40 | 2 | 2 | 2 |
| 41 | 2 | 2 | 3 |
| 42 | 2 | 2 | 3 |
| 43 | 2 | 2 | 1 |
| 44 | 2 | 2 | 2 |
| 45 | 2 | 2 | 2 |
| 46 | 2 | 2 | 2 |
| 47 | 2 | 2 | 2 |
| 48 | 2 | 2 | 2 |
| 49 | 2 | 2 | 2 |
| 50 | 2 | 2 | 1 |

TABLE 16d
Data for Pseudomonas, particularly Pseudomonas aeruginosa (continued)

| No. | AZT_pv_adj | CAZ_pv_adj | CP_pv_adj | CPE_pv_adj | GM_pv_adj |
|---|---|---|---|---|---|
| 1 | 4.68E−03 | 2.31E−09 | 4.27E−32 | 5.83E−17 | 1.14E−56 |
| 2 | 1.88E−03 | 1.86E−08 | 3.37E−28 | 4.30E−16 | 2.05E−42 |
| 3 | 4.88E−01 | 1.79E−02 | 4.13E−10 | 4.41E−04 | 7.91E−18 |
| 4 | 5.97E−01 | 1.23E−02 | 2.07E−09 | 2.52E−04 | 9.24E−17 |
| 5 | 5.49E−01 | 5.49E−01 | 9.07E−06 | 1.26E−01 | 1.33E−11 |
| 6 | 5.49E−01 | 5.49E−01 | 9.07E−06 | 1.26E−01 | 1.33E−11 |
| 7 | 6.66E−01 | 3.70E−01 | 9.33E−05 | 1.41E−01 | 5.53E−11 |
| 8 | 9.33E−01 | 6.81E−02 | 1.30E−09 | 3.20E−02 | 9.74E−12 |
| 9 | 2.57E−01 | 3.98E−05 | 1.63E−09 | 1.56E−07 | 6.24E−16 |
| 10 | 7.47E−01 | 4.36E−01 | 2.70E−04 | 2.27E−01 | 5.68E−10 |
| 11 | 4.31E−03 | 4.22E−08 | 3.91E−13 | 2.77E−09 | 7.84E−16 |
| 12 | 3.06E−02 | 6.75E−05 | 1.29E−09 | 9.32E−06 | 1.77E−14 |
| 13 | 2.11E−03 | 3.40E−07 | 3.34E−10 | 7.91E−07 | 4.31E−14 |
| 14 | 6.90E−01 | 3.88E−02 | 8.36E−06 | 2.05E−02 | 1.97E−09 |
| 15 | 1.08E−01 | 8.48E−04 | 2.11E−07 | 1.99E−04 | 4.46E−13 |
| 16 | 8.07E−01 | 4.16E−02 | 3.85E−08 | 3.59E−02 | 1.19E−09 |
| 17 | 6.52E−01 | 4.40E−01 | 1.90E−04 | 5.44E−01 | 1.07E−07 |
| 18 | 1.20E−02 | 1.84E−06 | 1.64E−08 | 1.64E−07 | 4.99E−11 |
| 19 | 4.08E−01 | 1.28E−02 | 2.37E−05 | 3.15E−02 | 2.20E−09 |
| 20 | 9.48E−01 | 6.78E−02 | 9.58E−07 | 3.17E−02 | 1.32E−09 |
| 21 | 5.47E−01 | 9.24E−03 | 2.24E−04 | 5.63E−02 | 4.24E−08 |
| 22 | 8.08E−01 | 1.43E−01 | 2.42E−06 | 2.48E−01 | 1.01E−07 |
| 23 | 8.44E−01 | 2.48E−01 | 4.61E−04 | 3.25E−01 | 9.75E−07 |
| 24 | 4.14E−01 | 4.37E−03 | 1.78E−04 | 5.65E−02 | 1.49E−07 |
| 25 | 3.25E−01 | 1.51E−03 | 6.15E−05 | 2.63E−02 | 9.67E−08 |
| 26 | 6.54E−01 | 5.11E−03 | 1.38E−05 | 1.82E−02 | 5.63E−08 |
| 27 | 1.63E−01 | 1.65E−04 | 7.86E−05 | 1.59E−02 | 1.34E−09 |
| 28 | 7.69E−01 | 2.48E−01 | 7.44E−04 | 3.25E−01 | 2.80E−06 |
| 29 | 4.44E−01 | 6.54E−02 | 4.51E−05 | 8.97E−06 | 1.56E−07 |
| 30 | 9.82E−01 | 1.63E−01 | 3.28E−06 | 2.73E−01 | 2.89E−08 |
| 31 | 7.11E−03 | 2.08E−05 | 1.73E−08 | 1.31E−06 | 7.90E−09 |
| 32 | 4.78E−01 | 7.49E−03 | 4.49E−05 | 2.57E−02 | 2.96E−07 |
| 33 | 6.55E−01 | 1.81E−01 | 8.24E−06 | 2.97E−01 | 2.97E−07 |
| 34 | 5.00E−01 | 5.68E−03 | 8.53E−03 | 7.20E−03 | 1.63E−11 |
| 35 | 4.77E−01 | 4.27E−03 | 6.00E−05 | 2.17E−02 | 9.67E−08 |
| 36 | 4.77E−01 | 4.27E−03 | 6.00E−05 | 2.17E−02 | 9.67E−08 |
| 37 | 4.77E−01 | 4.27E−03 | 6.00E−05 | 2.17E−02 | 9.67E−08 |
| 38 | 5.46E−01 | 9.06E−03 | 6.00E−05 | 3.01E−02 | 2.03E−07 |
| 39 | 4.78E−01 | 4.34E−03 | 1.28E−04 | 2.20E−02 | 1.35E−07 |
| 40 | 5.47E−01 | 9.22E−03 | 7.62E−05 | 3.04E−02 | 2.83E−07 |
| 41 | 4.78E−01 | 4.34E−03 | 1.28E−04 | 2.20E−02 | 1.35E−07 |
| 42 | 4.78E−01 | 4.34E−03 | 1.28E−04 | 2.20E−02 | 1.35E−07 |
| 43 | 1 | 1.81E−01 | 8.55E−06 | 2.01E−01 | 4.71E−07 |
| 44 | 9.49E−01 | 1.43E−01 | 2.47E−06 | 2.48E−01 | 2.19E−07 |
| 45 | 1 | 1.12E−01 | 4.65E−06 | 2.01E−01 | 2.19E−07 |
| 46 | 9.82E−01 | 4.90E−02 | 6.77E−07 | 7.55E−02 | 2.07E−07 |
| 47 | 4.78E−01 | 7.49E−03 | 7.54E−05 | 2.57E−02 | 2.96E−07 |
| 48 | 9.49E−01 | 1.44E−01 | 6.20E−06 | 2.48E−01 | 4.67E−07 |
| 49 | 9.82E−01 | 1.43E−01 | 2.41E−06 | 1.62E−01 | 6.60E−07 |
| 50 | 7.30E−01 | 2.71E−01 | 1.97E−05 | 4.14E−01 | 1.33E−06 |

TABLE 16e
Data for Pseudomonas, particularly Pseudomonas aeruginosa (continued)

| No. | IMP_pv_adj | LVX_pv_adj | MER_pv_adj | P/T_pv_adj | TO_pv_adj |
|---|---|---|---|---|---|
| 1 | 1.35E−04 | 9.50E−27 | 2.29E−10 | 3.68E−18 | 4.53E−78 |
| 2 | 3.88E−03 | 4.29E−23 | 1.88E−05 | 3.33E−17 | 2.76E−58 |
| 3 | 4.33E−01 | 1.56E−06 | 1.57E−01 | 7.34E−04 | 4.23E−28 |
| 4 | 3.93E−01 | 4.01E−06 | 1.33E−01 | 9.25E−04 | 2.91E−26 |
| 5 | 2.74E−01 | 1.86E−03 | 8.61E−02 | 3.50E−01 | 5.62E−22 |
| 6 | 2.74E−01 | 1.86E−03 | 8.61E−02 | 3.50E−01 | 5.62E−22 |
| 7 | 5.97E−01 | 7.47E−03 | 1.01E−01 | 4.09E−01 | 1.91E−20 |
| 8 | 4.04E−02 | 2.96E−08 | 8.12E−03 | 3.01E−03 | 4.25E−20 |
| 9 | 4.48E−01 | 4.75E−07 | 8.35E−03 | 1.95E−05 | 2.80E−19 |
| 10 | 8.37E−01 | 1.48E−02 | 2.27E−01 | 4.37E−01 | 4.16E−19 |
| 11 | 1 | 7.77E−10 | 2.74E−02 | 2.06E−06 | 4.72E−19 |
| 12 | 8.04E−01 | 2.34E−06 | 1.05E−01 | 5.83E−04 | 2.33E−17 |
| 13 | 1 | 1.18E−06 | 1.82E−01 | 5.92E−05 | 3.60E−17 |
| 14 | 2.13E−02 | 2.85E−04 | 4.99E−01 | 1.04E−02 | 1.13E−14 |
| 15 | 4.16E−01 | 1.60E−05 | 4.41E−01 | 1.42E−03 | 2.33E−14 |
| 16 | 1.11E−03 | 7.44E−05 | 3.68E−04 | 1.33E−02 | 2.34E−14 |
| 17 | 4.55E−01 | 3.37E−02 | 3.01E−01 | 5.40E−01 | 2.91E−14 |
| 18 | 9.48E−01 | 9.19E−07 | 1.68E−01 | 5.53E−05 | 5.50E−14 |
| 19 | 1 | 1.24E−03 | 2.34E−01 | 1.09E−01 | 6.07E−14 |
| 20 | 1.05E−02 | 1.87E−04 | 2.63E−01 | 3.01E−02 | 7.75E−14 |
| 21 | 1.13E−01 | 1.21E−02 | 5.24E−03 | 6.95E−03 | 3.34E−13 |
| 22 | 2.50E−03 | 3.35E−04 | 2.39E−03 | 1.14E−01 | 6.17E−13 |
| 23 | 9.76E−02 | 4.12E−02 | 1.60E−01 | 4.20E−01 | 6.43E−13 |
| 24 | 1.75E−01 | 1.21E−02 | 8.59E−03 | 4.17E−03 | 1.21E−12 |
| 25 | 1.31E−01 | 7.32E−03 | 6.68E−03 | 1.51E−03 | 1.22E−12 |
| 26 | 9.53E−02 | 5.07E−03 | 6.50E−03 | 9.57E−03 | 1.79E−12 |
| 27 | 1.89E−02 | 8.78E−03 | 1.36E−04 | 3.10E−04 | 2.12E−12 |
| 28 | 1.14E−01 | 4.77E−02 | 1.85E−01 | 4.19E−01 | 2.48E−12 |
| 29 | 3.21E−02 | 1.60E−05 | 3.06E−01 | 2.70E−04 | 3.74E−12 |
| 30 | 4.18E−03 | 1.07E−03 | 6.72E−03 | 1.01E−01 | 4.43E−12 |
| 31 | 8.38E−01 | 7.16E−05 | 2.64E−01 | 1.39E−03 | 5.33E−12 |
| 32 | 6.86E−02 | 3.50E−03 | 3.93E−03 | 1.13E−02 | 6.00E−12 |
| 33 | 5.18E−03 | 1.07E−03 | 8.59E−03 | 1.13E−01 | 7.28E−12 |
| 34 | 9.58E−01 | 1.06E−02 | 1.47E−01 | 6.26E−03 | 7.48E−12 |
| 35 | 8.10E−02 | 4.28E−03 | 4.05E−03 | 8.08E−03 | 9.72E−12 |
| 36 | 8.10E−02 | 4.28E−03 | 4.05E−03 | 8.08E−03 | 9.72E−12 |
| 37 | 8.10E−02 | 4.28E−03 | 4.05E−03 | 8.08E−03 | 9.72E−12 |
| 38 | 8.10E−02 | 4.28E−03 | 4.05E−03 | 1.56E−02 | 9.72E−12 |
| 39 | 8.13E−02 | 7.24E−03 | 5.04E−03 | 9.57E−03 | 9.74E−12 |
| 40 | 8.13E−02 | 5.09E−03 | 5.04E−03 | 1.83E−02 | 9.74E−12 |
| 41 | 8.13E−02 | 7.24E−03 | 5.04E−03 | 9.57E−03 | 9.74E−12 |
| 42 | 8.13E−02 | 7.24E−03 | 5.04E−03 | 9.57E−03 | 9.74E−12 |
| 43 | 4.13E−03 | 1.98E−03 | 1.07E−02 | 1.29E−01 | 1.06E−11 |
| 44 | 2.49E−03 | 1.32E−03 | 4.07E−03 | 1.01E−01 | 1.06E−11 |
| 45 | 2.49E−03 | 1.98E−03 | 4.07E−03 | 7.86E−02 | 1.06E−11 |
| 46 | 6.61E−03 | 1.62E−03 | 6.66E−03 | 3.47E−02 | 1.13E−11 |
| 47 | 6.86E−02 | 5.04E−03 | 3.93E−03 | 1.56E−02 | 1.64E−11 |
| 48 | 1.92E−03 | 1.62E−03 | 5.24E−03 | 1.28E−01 | 1.85E−11 |
| 49 | 3.22E−03 | 1.08E−03 | 6.76E−03 | 7.83E−02 | 1.86E−11 |
| 50 | 6.52E−03 | 4.34E−03 | 1.32E−02 | 2.40E−01 | 1.87E−11 |

TABLE 16f
Data for Pseudomonas, particularly Pseudomonas aeruginosa (continued)

| | | | | |
|---|---|---|---|---|
| No. | Locus.Tag | Gene.Symbol | GenBank.Accession | Chromosome |

| | | | |
|---|---|---|---|
| 1 | PSPA7_5342 | | YP_001350673 |
| 2 | PSPA7_5335 | | YP_001350666 |
| 3 | PA39016_001160000 | | ZP_07794022 |
| 4 | PputW619_2322 | | YP_001749191 |
| 5 | PSPA7_0102 | | YP_001345498 |
| 6 | PSTAB_1238 | merR | YP_004713608 |
| 7 | PPS_5233 | | YP_004704640 |
| 8 | PA39016_001640030 | | ZP_07794960 |
| 9 | PaerC_01001712 | | ZP_00968897 |
| 10 | PA39016_001140033 | | ZP_07794005 |
| 11 | PA39016_001790028 | | ZP_07795388 |
| 12 | Paer2_01003738 | | ZP_00973073 |
| 13 | PA39016_000110208 | | ZP_07792174 |
| 14 | Paer2_01005870 | | ZP_00970967 |
| 15 | PSPA7_0117 | | YP_001345513 |
| 16 | PSPA7_3727 | | YP_001349081 |
| 17 | PA39016_001140034 | | ZP_07794006 |
| 18 | PSPA7_5254 | | YP_001350586 |
| 19 | PputW619_2321 | | YP_001749190 |
| 20 | PSPA7_4822 | | YP_001350163 |
| 21 | Paer2_01002125 | | ZP_00974743 |
| 22 | PaerPAb_010100012576 | | ZP_06878458 |
| 23 | PA14_15470 | merP | YP_789375 |
| 24 | Paer2_01002118 | | ZP_00974736 |
| 25 | PaerPA_01003088 | | ZP_01365958 |
| 26 | PLES_26911 | | YP_002440283 |
| 27 | PaerPA_01003092 | | ZP_01365962 |
| 28 | Paer2_01002142 | | ZP_00974760 |
| 29 | PSPA7_0357 | | YP_001345752 |
| 30 | PA39016_001640027 | | ZP_07794957 |
| 31 | PA14_49520 | pyoS3A | YP_792115 |
| 32 | PaerPA_01003114 | | ZP_01365983 |
| 33 | PSPA7_3718 | | YP_001349072 |
| 34 | PSPA7_0113 | merP1 | YP_001345509 |
| 35 | Paer2_01002136 | | ZP_00974754 |
| 36 | PA39016_001010047 | | ZP_07793693 |
| 37 | PaerPA_01003095 | | ZP_01365965 |
| 38 | PaerPA_01003132 | | ZP_01366001 |
| 39 | Paer2_01002121 | | ZP_00974739 |
| 40 | PLES_26591 | | YP_002440252 |
| 41 | PSTAA_1280 | | AEA83190 |
| 42 | PaerPA_01003094 | | ZP_01365964 |
| 43 | PA39016_001650006 | | ZP_07794967 |
| 44 | PA39016_001650001 | | ZP_07794962 |
| 45 | PA14_30900 | | YP_790630 |
| 46 | Paer2_01002387 | | ZP_00974497 |
| 47 | Paer2_01002180 | | ZP_00974798 |
| 48 | Avin_35690 | trbE | YP_002800691 |
| 49 | PA39016_001650003 | | ZP_07794964 |
| 50 | PSPA7_3698 | | YP_001349052 |

TABLE 16g
Data for Pseudomonas, particularly
Pseudomonas aeruginosa (continued)

| No. | Start.Coord | End.Coord | Strand | Scaffold.ID |
|---|---|---|---|---|
| 1 | 5509888 | 5510901 | + | 640753026 |
| 2 | 5497616 | 5498380 | − | 640753026 |
| 3 | 269 | 829 | + | 649999021 |
| 4 | 2600850 | 2601410 | − | 641522670 |
| 5 | 112316 | 112732 | + | 640753026 |
| 6 | 1298354 | 1298788 | + | 650716170 |
| 7 | 5930458 | 5930823 | − | 650716164 |
| 8 | 29403 | 29642 | − | 649999069 |
| 9 | 9109 | 10122 | − | 638362473 |
| 10 | 35241 | 35606 | − | 649999019 |
| 11 | 25607 | 28270 | + | 649999084 |
| 12 | 18240 | 19688 | − | 638362609 |
| 13 | 212874 | 213821 | − | 649998930 |
| 14 | 22370 | 34666 | + | 638362642 |
| 15 | 122819 | 123664 | + | 640753026 |
| 16 | 3864574 | 3865185 | − | 640753026 |
| 17 | 35624 | 37309 | − | 649999019 |
| 18 | 5409448 | 5411001 | − | 640753026 |
| 19 | 2597880 | 2600846 | − | 641522670 |
| 20 | 4961575 | 4962753 | − | 640753026 |
| 21 | 167495 | 167935 | + | 638362589 |
| 22 | 28 | 241 | − | 647002430 |
| 23 | 1310460 | 1310735 | − | 639279323 |
| 24 | 161059 | 161934 | + | 638362589 |
| 25 | 3500513 | 3501292 | + | 638372930 |
| 26 | 2885013 | 2885837 | − | 643348637 |
| 27 | 3505406 | 3506134 | + | 638372930 |
| 28 | 182786 | 184474 | + | 638362589 |
| 29 | 366452 | 367480 | − | 640753026 |
| 30 | 26408 | 27688 | − | 649999069 |
| 31 | 4403159 | 4405534 | − | 639279323 |
| 32 | 3528459 | 3529049 | + | 638372930 |
| 33 | 3855983 | 3856195 | − | 640753026 |
| 34 | 121405 | 121680 | − | 640753026 |
| 35 | 179158 | 179895 | + | 638362589 |
| 36 | 48194 | 50227 | + | 649999006 |
| 37 | 3507452 | 3509473 | + | 638372930 |
| 38 | 3547764 | 3548102 | + | 638372930 |
| 39 | 163874 | 164434 | + | 638362589 |
| 40 | 2856655 | 2857038 | − | 643348637 |
| 41 | 1367161 | 1367601 | − | 651053081 |
| 42 | 3506732 | 3507172 | + | 638372930 |
| 43 | 6653 | 8650 | − | 649999070 |
| 44 | 2001 | 4451 | − | 649999070 |
| 45 | 2683111 | 2683836 | − | 639279323 |
| 46 | 138340 | 138654 | − | 638362591 |
| 47 | 214185 | 216386 | + | 638362589 |
| 48 | 3640230 | 3642680 | − | 643692060 |
| 49 | 4730 | 5116 | − | 649999070 |
| 50 | 3833901 | 3834893 | − | 640753026 |

### Example 9

### Salmonella species

[0277] The procedure was carried out as in Example 1, except that the following microorganisms were used:

[0278] Bacterial Strains

[0279] The inventors selected 634 Salmonella strains, particularly from Salmonella_choleraesuis, Salmonella_dublin, Salmonella_enterica_ssp_arizonae, Salmonella_enterica_ssp_diarizoniae, Salmonella_enteritidis, Salmonella_gallinarum, Salmonella Group_A, Salmonella_Group_B, Salmonella_Group_C, Salmonella_Group_D, Salmonella_heidelberg, Salmonella_miami, Salmonella_newport, Salmonella_panama, Salmonella_parahaemolyticus_A, Salmonella_paratyphi_A, Salmonella_paratyphi_B, Salmonella_pullorum, Salmonella_senfienberg, Salmonella species, Salmonella_species_Lac_−−,_ONPG_+, Salmonella_species_Lac_+,_ONPG_+, Salmonella subgenus_I, Salmonella_subgenus_II, Salmonella_subgenus_IV, Salmonella subgroup_I_Suc+, Salmonella_tennessee, and Salmonella_typhi, from the microbiology strain collection at Siemens Healthcare Diagnostics (West Sacramento, Calif.) for susceptibility testing and whole genome sequencing.

[0280] From MetaRef, 713 centroids of Salmonella species were used as reference sequences.

[0281] The results for Salmonella species are shown in Tables 17 (corresponding to Table 1) and 18 (corresponding to Table 2).

TABLE 17a
Data for Salmonella species

| | Scaffold.External. | | |
|---|---|---|---|
| No. | Accession | Scaffold.Name | best_pv |
| 1 | NC_011083 | Salmonella enterica subsp. enterica serovar Heidelberg str. SL476: | 1.09817680047592e−59 |
| | | NC_011083 | |
| 2 | NC_011092 | Salmonella enterica subsp. enterica serovar Schwarzengrund str. | 3.48405564494782e−42 |
| | | CVM19633 plasmid pCVM19633_110: NC_011092 | |
| 3 | NZ_ADUB01000261 | Escherichia coli MS 175-1 E_coli175-1-1.0_Cont542.3: NZ_ADUB01000261 | 2.50701590062067e−24 |
| 4 | NC_009651 | Klebsiella pneumoniae subsp. pneumoniae MGH 78578 plasmid pKPN5: | 3.64875434048827e−22 |
| | | NC_009651 | |
| 5 | NC_013509 | Edwardsiella tarda EIB202 plasmid pEIB202: NC_013509 | 1.44445847616457e−21 |
| 6 | NZ_ABFH01000001 | Salmonella enterica subsp. enterica serovar Virchow str. SL491, | 3.48310596778991e−21 |
| | | unfinished sequence: NZ_ABFH01000001 | |
| 7 | NC_011743 | Escherichia fergusonii ATCC 35469 plasmid pEFER: NC_011743 | 3.48310596778991e−21 |
| 8 | NZ_ADWV01000045 | Escherichia coli MS 107-1 E_coliMS107-1-1.0.1_Cont44.1: | 1.74745925214862e−20 |
| | | NZ_ADWV01000045 | |
| 9 | NC_013509 | Edwardsiella tarda EIB202 plasmid pEIB202: NC_013509 | 3.3130773442785e−20 |
| 10 | NZ_AAJX01000089 | Escherichia coli B171, unfinished sequence: NZ_AAJX01000089 | 5.485221922018e−20 |
| 11 | NZ_AFBO01000625 | Klebsiella sp. MS 92-3 K_spMS92-3-1.0_Cont1175.2: NZ_AFBO01000625 | 7.41649956052229e−17 |
| 12 | NZ_ADTM01000311 | Escherichia coli MS 182-1 E_coli182-1-1.0_Cont460.3: NZ_ADTM01000311 | 8.87457605302667e−17 |
| 13 | CP001383 | Shigella flexneri 2002017: CP001383 | 5.28841759700461e−14 |
| 14 | NC_007384 | Shigella sonnei Ss046: NC_007384 | 5.8995130852235e−14 |
| 15 | NZ_ADUD01000537 | Escherichia coli MS 196-1 E_coli196-1-1.0_Cont1482.1: | 1.65276555063276e−13 |
| | | NZ_ADUD01000537 | |
| 16 | NZ_ABFH01000001 | Salmonella enterica subsp. enterica serovar Virchow str. SL491, | 1.65276555063276e−13 |
| | | unfinished sequence: NZ_ABFH01000001 | |
| 17 | NC_009650 | Klebsiella pneumoniae subsp. pneumoniae MGH 78578 plasmid pKPN4: | 3.61473686772869e−13 |
| | | NC_009650 | |
| 18 | NZ_ABFH01000001 | Salmonella enterica subsp. enterica serovar Virchow str. SL491, | 5.18796174101329e−13 |
| | | unfinished sequence: NZ_ABFH01000001 | |
| 19 | NZ_ADWV01000017 | Escherichia coli MS 107-1 E_coliMS107-1-1.0.1_Cont16.1: | 3.37689513091676e−12 |
| | | NZ_ADWV01000017 | |
| 20 | NZ_ADWT01000152 | Escherichia coli MS 124-1 E_coliMS124-1-1.0.1_Cont151.1: | 5.32683257781776e−12 |
| | | NZ_ADWT01000152 | |
| 21 | CP001383 | Shigella flexneri 2002017: CP001383 | 9.59412420701724e−12 |
| 22 | NC_011081 | Salmonella enterica subsp. enterica serovar Heidelberg str. SL476 | 1.80214883490127e−11 |
| | | plasmid pSL476_91: NC_011081 | |
| 23 | AP011957 | Salmonella enterica subsp. enterica serovar Typhimurium str. T000240 | 2.02729069966733e−11 |
| | | DNA: AP011957 | |
| 24 | NC_009650 | Klebsiella pneumoniae subsp. pneumoniae MGH 78578 plasmid pKPN4: | 2.02729069966733e−11 |
| | | NC_009650 | |
| 25 | NC_011092 | Salmonella enterica subsp. enterica serovar Schwarzengrund str. | 3.62500325966221e−11 |
| | | CVM19633 plasmid pCVM19633_110: NC_011092 | |
| 26 | NZ_ABKX01000001 | Escherichia albertii TW07627, unfinished sequence: NZ_ABKX01000001 | 5.50212585421897e−11 |
| 27 | CP002490 | Salmonella enterica subsp. enterica serovar Typhimurium str. 4/74 | 1.68214594408478e−10 |
| | | plasmid TY474p3: CP002490 | |
| 28 | NC_012124 | Salmonella enterica subsp. enterica serovar Paratyphi C strain | 8.57828076933948e−10 |
| | | RKS4594 plasmid pSPCV: NC_012124 | |
| 29 | NC_007385 | Shigella sonnei Ss046 plasmid pSS_046: NC_007385 | 1.06330274297554e−09 |
| 30 | NC_004851 | Shigella flexneri 2a str. 301 plasmid pCP301: NC_004851 | 2.2269317280314e−09 |
| 31 | NC_003277 | Salmonella typhimurium LT2 plasmid pSLT: NC_003277 | 2.2269317280314e−09 |
| 32 | CP001362 | Salmonella enterica subsp. enterica serovar Typhimurium str. 14028S | 1.72272938882188e−08 |
| | | plasmid: CP001362 | |
| 33 | NZ_ABKX01000001 | Escherichia albertii TW07627, unfinished sequence: NZ_ABKX01000001 | 1.8184047282463e−08 |
| 34 | NC_012124 | Salmonella enterica subsp. enterica serovar Paratyphi C strain | 3.5232749457209e−08 |
| | | RKS4594 plasmid pSPCV: NC_012124 | |
| 35 | NC_012125 | Salmonella enterica subsp. enterica serovar Paratyphi C strain | 4.21301623299358e−08 |
| | | RKS4594: NC_012125 | |
| 36 | CP002487 | Salmonella enterica subsp. enterica serovar Typhimurium str. 4/74: | 5.49621728459414e−08 |
| | | CP002487 | |
| 37 | NZ_ABEL01000010 | Salmonella enterica subsp. enterica serovar Heidelberg str. SL486, | 9.94168564125988e−08 |
| | | unfinished sequence: NZ_ABEL01000010 | |
| 38 | NC_012124 | Salmonella enterica subsp. enterica serovar Paratyphi C strain | 1.81471391611537e−07 |
| | | RKS4594 plasmid pSPCV: NC_012124 | |
| 39 | NC_012125 | Salmonella enterica subsp. enterica serovar Paratyphi C strain | 1.9714526298817e−07 |
| | | RKS4594: NC_012125 | |
| 40 | NC_003197 | Salmonella typhimurium LT2: NC_003197 | 2.16264005553646e−07 |
| 41 | CP002488 | Salmonella enterica subsp. enterica serovar Typhimurium str. 4/74 | 2.16264005553646e−07 |
| | | plasmid TY474p1: CP002488 | |
| 42 | NZ_ABAM01000046 | Salmonella enterica subsp. enterica serovar Saintpaul str. SARA23, | 2.29779633234294e−07 |
| | | unfinished sequence: NZ_ABAM01000046 | |
| 43 | NC_010102 | Salmonella enterica subsp. enterica serovar Paratyphi B str. SPB7: | 3.05541326329248e−07 |
| | | NC_010102 | |
| 44 | AP011957 | Salmonella enterica subsp. enterica serovar Typhimurium str. T000240 | 3.48861961356893e−07 |
| | | DNA: AP011957 | |
| 45 | NC_010067 | Salmonella enterica subsp. arizonae serovar 62:z4,z23:--: NC_010067 | 4.35325104483177e−07 |
| 46 | NC_010067 | Salmonella enterica subsp. arizonae serovar 62:z4,z23:--: NC_010067 | 4.35325104483177e−07 |
| 47 | NC_015761 | Salmonella bongori NCTC 12419: NC_015761 | 4.35325104483177e−07 |
| 48 | NZ_ABEL01000010 | Salmonella enterica subsp. enterica serovar Heidelberg str. SL486, | 7.61833017744037e−07 |
| | | unfinished sequence: NZ_ABEL01000010 | |
| 49 | NC_012125 | Salmonella enterica subsp. enterica serovar Paratyphi C strain | 8.71713912669417e−07 |
| | | RKS4594: NC_012125 | |
| 50 | NZ_ABEJ01000032 | Salmonella enterica subsp. enterica serovar Schwarzengrund str. | 8.71713912669417e−07 |
| | | SL480, unfinished sequence: NZ_ABEJ01000032 | |

TABLE 17b
Data for Salmonella species (continued)

| No. | sign_phenos | sign_phenos_class | best_pheno | best_pheno_class |
|---|---|---|---|---|
| 1 | AM; A/S | lactam | AM | lactam |
| 2 | AM; A/S | lactam | AM | lactam |
| 3 | AM; A/S | lactam | AM | lactam |
| 4 | AM; A/S | lactam | A/S | lactam |
| 5 | AM; A/S | lactam | AM | lactam |
| 6 | AM; A/S | lactam | A/S | lactam |
| 7 | AM; A/S | lactam | AM | lactam |
| 8 | AM; A/S | lactam | A/S | lactam |
| 9 | AM; A/S | lactam | AM | lactam |
| 10 | AM; A/S | lactam | A/S | lactam |
| 11 | AM; A/S | lactam | A/S | lactam |
| 12 | AM; A/S | lactam | A/S | lactam |
| 13 | AM; A/S | lactam | AM | lactam |
| 14 | AM; A/S | lactam | A/S | lactam |
| 15 | AM; A/S | lactam | A/S | lactam |
| 16 | AM; A/S | lactam | A/S | lactam |
| 17 | AM; A/S | lactam | A/S | lactam |
| 18 | AM; A/S | lactam | A/S | lactam |
| 19 | AM; A/S | lactam | A/S | lactam |
| 20 | AM; A/S | lactam | AM | lactam |
| 21 | AM; A/S | lactam | AM | lactam |
| 22 | AM; A/S | lactam | AM | lactam |
| 23 | AM; A/S | lactam | A/S | lactam |
| 24 | AM; A/S | lactam | A/S | lactam |
| 25 | AM; A/S | lactam | A/S | lactam |
| 26 | AM; A/S | lactam | AM | lactam |
| 27 | AM; A/S | lactam | AM | lactam |
| 28 | AM; A/S | lactam | AM | lactam |
| 29 | AM; A/S | lactam | AM | lactam |
| 30 | AM; A/S | lactam | AM | lactam |
| 31 | AM; A/S | lactam | AM | lactam |
| 32 | AM; A/S | lactam | AM | lactam |
| 33 | AM; A/S | lactam | AM | lactam |
| 34 | AM; A/S | lactam | AM | lactam |
| 35 | AM; A/S | lactam | AM | lactam |
| 36 | AM; A/S | lactam | AM | lactam |
| 37 | AM; A/S | lactam | A/S | lactam |
| 38 | AM; A/S | lactam | AM | lactam |
| 39 | AM; A/S | lactam | AM | lactam |
| 40 | AM; A/S | lactam | AM | lactam |
| 41 | AM; A/S | lactam | AM | lactam |
| 42 | AM; A/S | lactam | A/S | lactam |
| 43 | AM; A/S | lactam | AM | lactam |
| 44 | AM; A/S | lactam | A/S | lactam |
| 45 | AM; A/S | lactam | A/S | lactam |
| 46 | AM; A/S | lactam | A/S | lactam |
| 47 | AM; A/S | lactam | A/S | lactam |
| 48 | AM; A/S | lactam | A/S | lactam |
| 49 | AM; A/S | lactam | A/S | lactam |
| 50 | AM; A/S | lactam | A/S | lactam |

TABLE 17c
Data for Salmonella species (continued)

| No. | num_lactam | AM_pv_adj | A/S_pv_adj |
|---|---|---|---|
| 1 | 2 | 1.10E−59 | 1.70E−55 |
| 2 | 2 | 3.48E−42 | 1.81E−40 |
| 3 | 2 | 2.51E−24 | 2.30E−22 |
| 4 | 2 | 1.08E−21 | 3.65E−22 |
| 5 | 2 | 1.44E−21 | 6.88E−20 |
| 6 | 2 | 1.05E−20 | 3.48E−21 |
| 7 | 2 | 3.48E−21 | 1.05E−20 |
| 8 | 2 | 5.22E−20 | 1.75E−20 |
| 9 | 2 | 3.31E−20 | 1.15E−19 |
| 10 | 2 | 1.65E−19 | 5.49E−20 |
| 11 | 2 | 1.74E−16 | 7.42E−17 |
| 12 | 2 | 2.98E−16 | 8.87E−17 |
| 13 | 2 | 5.29E−14 | 1.45E−13 |
| 14 | 2 | 1.45E−13 | 5.90E−14 |
| 15 | 2 | 3.62E−13 | 1.65E−13 |
| 16 | 2 | 3.62E−13 | 1.65E−13 |
| 17 | 2 | 6.38E−13 | 3.61E−13 |
| 18 | 2 | 1.10E−12 | 5.19E−13 |
| 19 | 2 | 6.91E−12 | 3.38E−12 |
| 20 | 2 | 5.33E−12 | 3.21E−11 |
| 21 | 2 | 9.59E−12 | 8.71E−10 |
| 22 | 2 | 1.80E−11 | 6.37E−10 |
| 23 | 2 | 3.64E−11 | 2.03E−11 |
| 24 | 2 | 3.64E−11 | 2.03E−11 |
| 25 | 2 | 6.67E−11 | 3.63E−11 |
| 26 | 2 | 5.50E−11 | 4.78E−09 |
| 27 | 2 | 1.68E−10 | 1.06E−09 |
| 28 | 2 | 8.58E−10 | 2.16E−08 |
| 29 | 2 | 1.06E−09 | 2.10E−08 |
| 30 | 2 | 2.23E−09 | 3.77E−08 |
| 31 | 2 | 2.23E−09 | 3.77E−08 |
| 32 | 2 | 1.72E−08 | 2.02E−07 |
| 33 | 2 | 1.82E−08 | 1.76E−06 |
| 34 | 2 | 3.52E−08 | 8.59E−08 |
| 35 | 2 | 4.21E−08 | 6.33E−08 |
| 36 | 2 | 5.50E−08 | 7.64E−08 |
| 37 | 2 | 1.40E−07 | 9.94E−08 |
| 38 | 2 | 1.81E−07 | 3.88E−07 |
| 39 | 2 | 1.97E−07 | 2.71E−07 |
| 40 | 2 | 2.16E−07 | 2.91E−07 |
| 41 | 2 | 2.16E−07 | 7.75E−07 |
| 42 | 2 | 7.51E−07 | 2.30E−07 |
| 43 | 2 | 3.06E−07 | 8.87E−07 |
| 44 | 2 | 2.22E−06 | 3.49E−07 |
| 45 | 2 | 1.28E−06 | 4.35E−07 |
| 46 | 2 | 1.28E−06 | 4.35E−07 |
| 47 | 2 | 1.25E−06 | 4.35E−07 |
| 48 | 2 | 2.83E−06 | 7.62E−07 |
| 49 | 2 | 1.23E−06 | 8.72E−07 |
| 50 | 2 | 4.30E−06 | 8.72E−07 |

TABLE 17d
Data for Salmonella species (continued)

| No. | Locus.Tag | Gene.Symbol | GenBank.Accession | Chromosome |
|---|---|---|---|---|
| 1 | SeHA_C1580 | blaT | YP_002045448 | |
| 2 | SeSA_B0079 | | YP_002112958 | plasmid pCVM19633_110 |
| 3 | HMPREF9547_03104 | | ZP_07169558 | |
| 4 | KPN_pKPN5p08201 | | YP_001338811 | plasmid pKPN5 |
| 5 | ETAE_p041 | folP | YP_003297635 | plasmid pEIB202 |
| 6 | Salmoentericaenterica_010100000245 | | ZP_02702077 | |
| 7 | pEFER_0049 | | YP_002394596 | plasmid pEFER |
| 8 | HMPREF9345_05066 | | ZP_07100147 | |
| 9 | ETAE_p040 | | YP_003297634 | plasmid pEIB202 |
| 10 | EcolB_01004576 | | ZP_00708527 | |
| 11 | HMPREF9538_04737 | | ZP_08307036 | |
| 12 | HMPREF9548_03784 | | ZP_07141588 | |
| 13 | SFxv_1142 | | ADA73400 | |
| 14 | SSON_3896 | aadA | YP_312670 | |
| 15 | HMPREF9551_04611 | | ZP_07191964 | |
| 16 | Salmoentericaenterica_010100000130 | | ZP_02702054 | |
| 17 | KPN_pKPN4p07064 | | YP_001338673 | plasmid pKPN4 |
| 18 | Salmoentericaenterica_010100000105 | | ZP_02702049 | |
| 19 | HMPREF9345_03525 | | ZP_07098656 | |
| 20 | HMPREF9347_06051 | | ZP_07213485 | |
| 21 | SFxv_1141 | | ADA73399 | |
| 22 | SeHA_A0031 | | YP_002043869 | plasmid pSL476_91 |
| 23 | STMDT12_C39390 | | BAJ38882 | |
| 24 | KPN_pKPN4p07068 | merC | YP_001338677 | plasmid pKPN4 |
| 25 | SeSA_B0082 | | YP_002112961 | plasmid pCVM19633_110 |
| 26 | ESCAB7627_0644 | | ZP_02900823 | |
| 27 | STM474_p303 | repA | ADX20580 | plasmid TY474p3 |
| 28 | SPC_p013 | rsdB | YP_002635587 | plasmid pSPCV |
| 29 | SSO_P190 | traD | YP_313445 | plasmid pSS_046 |
| 30 | CP0245 | mvpA | NP_858378 | plasmid pCP301 |
| 31 | PSLT105 | trbH | NP_490589 | plasmid pSLT |
| 32 | STM14_5622 | traD | ACY86531 | |
| 33 | ESCAB7627_0650 | | ZP_02900555 | |
| 34 | SPC_p042 | traX | YP_002635616 | plasmid pSPCV |
| 35 | SPC_2707 | | YP_002638248 | |
| 36 | STM474_1038 | | ADX16744 | |
| 37 | Senterienterica_010100019467 | | ZP_02668762 | |
| 38 | SPC_p041 | finO | YP_002635615 | plasmid pSPCV |
| 39 | SPC_2708 | | YP_002638249 | |
| 40 | STM1046 | | NP_460021 | |
| 41 | STM474_p1093 | ccdB | ADX20463 | plasmid TY474p1 |
| 42 | Sentent_010100022581 | | ZP_02341659 | |
| 43 | SPAB_05276 | | YP_001591385 | |
| 44 | STMDT12_C10780 | | BAJ36021 | |
| 45 | SARI_01515 | | YP_001570553 | |
| 46 | SARI_01514 | | YP_001570552 | |
| 47 | SBG_1292 | malR | YP_004730162 | |
| 48 | Senterienterica_010100019192 | | ZP_02668707 | |
| 49 | SPC_0340 | | YP_002635966 | |
| 50 | Senteenterica_010100025269 | | ZP_02664569 | |

TABLE 17e
Data for Salmonella species (continued)

| No. | Start.Coord | End.Coord | Strand | Scaffold.ID |
|---|---|---|---|---|
| 1 | 1525960 | 1526820 | + | 642555218 |
| 2 | 68933 | 70240 | + | 642555219 |
| 3 | 3248 | 3841 | + | 648291919 |
| 4 | 34908 | 35255 | − | 640753021 |
| 5 | 32101 | 32916 | − | 646311959 |
| 6 | 36757 | 37062 | + | 641778223 |
| 7 | 48658 | 49503 | + | 643692014 |
| 8 | 4715 | 5554 | − | 648294624 |
| 9 | 31237 | 32040 | − | 646311959 |
| 10 | 3555 | 4568 | + | 638359041 |
| 11 | 1555 | 2055 | − | 651333542 |
| 12 | 8819 | 9535 | + | 648288593 |
| 13 | 1108351 | 1108854 | − | 646862363 |
| 14 | 4110458 | 4111246 | − | 640427102 |
| 15 | 97 | 531 | − | 648293053 |
| 16 | 19257 | 19691 | + | 641778223 |
| 17 | 23310 | 24614 | − | 640753020 |
| 18 | 16271 | 16636 | − | 641778223 |
| 19 | 1071 | 1307 | − | 648294596 |
| 20 | 812 | 1663 | − | 648294425 |
| 21 | 1107342 | 1107968 | + | 646862363 |
| 22 | 16416 | 17195 | + | 642555216 |
| 23 | 4088051 | 4088326 | − | 651053007 |
| 24 | 25970 | 27664 | − | 640753020 |
| 25 | 71061 | 71411 | − | 642555219 |
| 26 | 233492 | 234697 | − | 641784575 |
| 27 | 1988 | 2827 | − | 650378006 |
| 28 | 10060 | 10842 | − | 643692029 |
| 29 | 166425 | 168626 | + | 640427103 |
| 30 | 198117 | 198515 | − | 637000224 |
| 31 | 86566 | 87285 | + | 637000134 |
| 32 | 84297 | 86459 | + | 646862361 |
| 33 | 238788 | 239996 | − | 641784575 |
| 34 | 28413 | 29153 | − | 643692029 |
| 35 | 2745099 | 2745596 | − | 643692030 |
| 36 | 1088568 | 1089272 | + | 650378003 |
| 37 | 62341 | 62874 | − | 641777794 |
| 38 | 27795 | 28358 | − | 643692029 |
| 39 | 2745695 | 2746027 | − | 643692030 |
| 40 | 1131381 | 1132118 | + | 637000122 |
| 41 | 73221 | 73526 | − | 650378004 |
| 42 | 23575 | 23910 | − | 641746440 |
| 43 | 4445787 | 4448009 | + | 641228523 |
| 44 | 1141208 | 1141399 | − | 651053007 |
| 45 | 1476854 | 1478026 | + | 641228515 |
| 46 | 1475252 | 1476844 | + | 641228515 |
| 47 | 1414087 | 1415115 | + | 650716177 |
| 48 | 26832 | 28046 | + | 641777794 |
| 49 | 367421 | 368839 | + | 643692030 |
| 50 | 35858 | 36535 | − | 641777693 |

TABLE 18a
Data for Salmonella species

| | Scaffold.External. | | |
|---|---|---|---|
| No. | Accession | Scaffold.Name | best_pv |
| 1 | NC_011083 | Salmonella enterica subsp. enterica serovar Heidelberg str. SL476: | 1.09817680047592e−59 |
| | | NC_011083 | |
| 2 | NC_011092 | Salmonella enterica subsp. enterica serovar Schwarzengrund str. | 3.48405564494782e−42 |
| | | CVM19633 plasmid pCVM19633_110: NC_011092 | |
| 3 | NZ_ADUB01000261 | Escherichia coli MS 175-1 E_coli175-1-1.0_Cont542.3: NZ_ADUB01000261 | 2.50701590062067e−24 |
| 4 | NC_009651 | Klebsiella pneumoniae subsp. pneumoniae MGH 78578 plasmid pKPN5: | 3.64875434048827e−22 |
| | | NC_009651 | |
| 5 | NC_013509 | Edwardsiella tarda EIB202 plasmid pEIB202: NC_013509 | 1.44445847616457e−21 |
| 6 | NZ_ABFH01000001 | Salmonella enterica subsp. enterica serovar Virchow str. SL491, | 3.48310596778991e−21 |
| | | unfinished sequence: NZ_ABFH01000001 | |
| 7 | NC_011743 | Escherichia fergusonii ATCC 35469 plasmid pEFER: NC_011743 | 3.48310596778991e−21 |
| 8 | NZ_ADWV01000045 | Escherichia coli MS 107-1 E_coliMS107-1-1.0.1_Cont44.1: | 1.74745925214862e−20 |
| | | NZ_ADWV01000045 | |
| 9 | NC_013509 | Edwardsiella tarda EIB202 plasmid pEIB202: NC_013509 | 3.3130773442785e−20 |
| 10 | NZ_AAJX01000089 | Escherichia coli B171, unfinished sequence: NZ_AAJX01000089 | 5.485221922018e−20 |
| 11 | NZ_AFBO01000625 | Klebsiella sp. MS 92-3 K_spMS92-3-1.0_Cont1175.2: NZ_AFBO01000625 | 7.41649956052229e−17 |
| 12 | NZ_ADTM01000311 | Escherichia coli MS 182-1 E_coli182-1-1.0_Cont460.3: NZ_ADTM01000311 | 8.87457605302667e−17 |
| 13 | CP001383 | Shigella flexneri 2002017: CP001383 | 5.28841759700461e−14 |
| 14 | NC_007384 | Shigella sonnei Ss046: NC_007384 | 5.8995130852235e−14 |
| 15 | NZ_ADUD01000537 | Escherichia coli MS 196-1 E_coli196-1-1.0_Cont1482.1: NZ_ADUD01000537 | 1.65276555063276e−13 |
| 16 | NZ_ABFH01000001 | Salmonella enterica subsp. enterica serovar Virchow str. SL491, | 1.65276555063276e−13 |
| | | unfinished sequence: NZ_ABFH01000001 | |
| 17 | NC_009650 | Klebsiella pneumoniae subsp. pneumoniae MGH 78578 plasmid pKPN4: | 3.61473686772869e−13 |
| | | NC_009650 | |
| 18 | NZ_ABFH01000001 | Salmonella enterica subsp. enterica serovar Virchow str. SL491, | 5.18796174101329e−13 |
| | | unfinished sequence: NZ_ABFH01000001 | |
| 19 | NZ_ADWV01000017 | Escherichia coli MS 107-1 E_coliMS107-1-1.0.1_Cont16.1: | 3.37689513091676e−12 |
| | | NZ_ADWV01000017 | |
| 20 | NZ_ADWT01000152 | Escherichia coli MS 124-1 E_coliMS124-1-1.0.1_Cont151.1: | 5.32683257781776e−12 |
| | | NZ_ADWT01000152 | |
| 21 | CP001383 | Shigella flexneri 2002017: CP001383 | 9.59412420701724e−12 |
| 22 | NC_011081 | Salmonella enterica subsp. enterica serovar Heidelberg str. SL476 | 1.80214883490127e−11 |
| | | plasmid pSL476_91: NC_011081 | |
| 23 | AP011957 | Salmonella enterica subsp. enterica serovar Typhimurium str. T000240 | 2.02729069966733e−11 |
| | | DNA: AP011957 | |
| 24 | NC_009650 | Klebsiella pneumoniae subsp. pneumoniae MGH 78578 plasmid pKPN4: | 2.02729069966733e−11 |
| | | NC_009650 | |
| 25 | NC_011092 | Salmonella enterica subsp. enterica serovar Schwarzengrund str. | 3.62500325966221e−11 |
| | | CVM19633 plasmid pCVM19633_110: NC_011092 | |
| 26 | NZ_ABKX01000001 | Escherichia albertii TW07627, unfinished sequence: NZ_ABKX01000001 | 5.50212585421897e−11 |
| 27 | CP002490 | Salmonella enterica subsp. enterica serovar Typhimurium str. 4/74 | 1.68214594408478e−10 |
| | | plasmid TY474p3: CP002490 | |
| 28 | NC_012124 | Salmonella enterica subsp. enterica serovar Paratyphi C strain RKS4594 | 8.57828076933948e−10 |
| | | plasmid pSPCV: NC_012124 | |
| 29 | NC_007385 | Shigella sonnei Ss046 plasmid pSS_046: NC_007385 | 1.06330274297554e−09 |
| 30 | NC_004851 | Shigella flexneri 2a str. 301 plasmid pCP301: NC_004851 | 2.2269317280314e−09 |
| 31 | NC_003277 | Salmonella typhimurium LT2 plasmid pSLT: NC_003277 | 2.2269317280314e−09 |
| 32 | CP001362 | Salmonella enterica subsp. enterica serovar Typhimurium str. 14028S | 1.72272938882188e−08 |
| | | plasmid: CP001362 | |
| 33 | NZ_ABKX01000001 | Escherichia albertii TW07627, unfinished sequence: NZ_ABKX01000001 | 1.8184047282463e−08 |
| 34 | NC_012124 | Salmonella enterica subsp. enterica serovar Paratyphi C strain RKS4594 | 3.5232749457209e−08 |
| | | plasmid pSPCV: NC_012124 | |
| 35 | NC_012125 | Salmonella enterica subsp. enterica serovar Paratyphi C strain RKS4594: | 4.21301623299358e−08 |
| | | NC_012125 | |
| 36 | CP002487 | Salmonella enterica subsp. enterica serovar Typhimurium str. 4/74: | 5.49621728459414e−08 |
| | | CP002487 | |
| 37 | NZ_ABEL01000010 | Salmonella enterica subsp. enterica serovar Heidelberg str. SL486, | 9.94168564125988e−08 |
| | | unfinished sequence: NZ_ABEL01000010 | |
| 38 | NC_012124 | Salmonella enterica subsp. enterica serovar Paratyphi C strain RKS4594 | 1.81471391611537e−07 |
| | | plasmid pSPCV: NC_012124 | |
| 39 | NC_012125 | Salmonella enterica subsp. enterica serovar Paratyphi C strain RKS4594: | 1.9714526298817e−07 |
| | | NC_012125 | |
| 40 | NC_003197 | Salmonella typhimurium LT2: NC_003197 | 2.16264005553646e−07 |
| 41 | CP002488 | Salmonella enterica subsp. enterica serovar Typhimurium str. 4/74 | 2.16264005553646e−07 |
| | | plasmid TY474p1: CP002488 | |
| 42 | NZ_ABAM01000046 | Salmonella enterica subsp. enterica serovar Saintpaul str. SARA23, | 2.29779633234294e−07 |
| | | unfinished sequence: NZ_ABAM01000046 | |
| 43 | NC_010102 | Salmonella enterica subsp. enterica serovar Paratyphi B str. SPB7: | 3.05541326329248e−07 |
| | | NC_010102 | |
| 44 | AP011957 | Salmonella enterica subsp. enterica serovar Typhimurium str. T000240 | 3.48861961356893e−07 |
| | | DNA: AP011957 | |
| 45 | NC_010067 | Salmonella enterica subsp. arizonae serovar 62:z4,z23:--: NC_010067 | 4.35325104483177e−07 |
| 46 | NC_010067 | Salmonella enterica subsp. arizonae serovar 62:z4,z23:--: NC_010067 | 4.35325104483177e−07 |
| 47 | NC_015761 | Salmonella bongori NCTC 12419: NC_015761 | 4.35325104483177e−07 |
| 48 | NZ_ABEL01000010 | Salmonella enterica subsp. enterica serovar Heidelberg str. SL486, | 7.61833017744037e−07 |
| | | unfinished sequence: NZ_ABEL01000010 | |
| 49 | NC_012125 | Salmonella enterica subsp. enterica serovar Paratyphi C strain RKS4594: | 8.71713912669417e−07 |
| | | NC_012125 | |
| 50 | NZ_ABEJ01000032 | Salmonella enterica subsp. enterica serovar Schwarzengrund str. SL480, | 8.71713912669417e−07 |
| | | unfinished sequence: NZ_ABEJ01000032 | |

TABLE 18b
Data for Salmonella species (continued)

| No. | sign_phenos | sign_phenos_class | best_pheno | best_pheno_class |
|---|---|---|---|---|
| 1 | AM; A/S | lactam | AM | lactam |
| 2 | AM; A/S | lactam | AM | lactam |
| 3 | AM; A/S | lactam | AM | lactam |
| 4 | AM; A/S | lactam | A/S | lactam |
| 5 | AM; A/S | lactam | AM | lactam |
| 6 | AM; A/S | lactam | A/S | lactam |
| 7 | AM; A/S | lactam | AM | lactam |
| 8 | AM; A/S | lactam | A/S | lactam |
| 9 | AM; A/S | lactam | AM | lactam |
| 10 | AM; A/S | lactam | A/S | lactam |
| 11 | AM; A/S | lactam | A/S | lactam |
| 12 | AM; A/S | lactam | A/S | lactam |
| 13 | AM; A/S | lactam | AM | lactam |
| 14 | AM; A/S | lactam | A/S | lactam |
| 15 | AM; A/S | lactam | A/S | lactam |
| 16 | AM; A/S | lactam | A/S | lactam |
| 17 | AM; A/S | lactam | A/S | lactam |
| 18 | AM; A/S | lactam | A/S | lactam |
| 19 | AM; A/S | lactam | A/S | lactam |
| 20 | AM; A/S | lactam | AM | lactam |
| 21 | AM; A/S | lactam | AM | lactam |
| 22 | AM; A/S | lactam | AM | lactam |
| 23 | AM; A/S | lactam | A/S | lactam |
| 24 | AM; A/S | lactam | A/S | lactam |
| 25 | AM; A/S | lactam | A/S | lactam |
| 26 | AM; A/S | lactam | AM | lactam |
| 27 | AM; A/S | lactam | AM | lactam |
| 28 | AM; A/S | lactam | AM | lactam |
| 29 | AM; A/S | lactam | AM | lactam |
| 30 | AM; A/S | lactam | AM | lactam |
| 31 | AM; A/S | lactam | AM | lactam |
| 32 | AM; A/S | lactam | AM | lactam |
| 33 | AM; A/S | lactam | AM | lactam |
| 34 | AM; A/S | lactam | AM | lactam |
| 35 | AM; A/S | lactam | AM | lactam |
| 36 | AM; A/S | lactam | AM | lactam |
| 37 | AM; A/S | lactam | A/S | lactam |
| 38 | AM; A/S | lactam | AM | lactam |
| 39 | AM; A/S | lactam | AM | lactam |
| 40 | AM; A/S | lactam | AM | lactam |
| 41 | AM; A/S | lactam | AM | lactam |
| 42 | AM; A/S | lactam | A/S | lactam |
| 43 | AM; A/S | lactam | AM | lactam |
| 44 | AM; A/S | lactam | A/S | lactam |
| 45 | AM; A/S | lactam | A/S | lactam |
| 46 | AM; A/S | lactam | A/S | lactam |
| 47 | AM; A/S | lactam | A/S | lactam |
| 48 | AM; A/S | lactam | A/S | lactam |
| 49 | AM; A/S | lactam | A/S | lactam |
| 50 | AM; A/S | lactam | A/S | lactam |

TABLE 18c
Data for Salmonella species (continued)

| No. | num_lactam | AM_pv_adj | A/S_pv_adj |
|---|---|---|---|
| 1 | 2 | 1.10E−59 | 1.70E−55 |
| 2 | 2 | 3.48E−42 | 1.81E−40 |
| 3 | 2 | 2.51E−24 | 2.30E−22 |
| 4 | 2 | 1.08E−21 | 3.65E−22 |
| 5 | 2 | 1.44E−21 | 6.88E−20 |
| 6 | 2 | 1.05E−20 | 3.48E−21 |
| 7 | 2 | 3.48E−21 | 1.05E−20 |
| 8 | 2 | 5.22E−20 | 1.75E−20 |
| 9 | 2 | 3.31E−20 | 1.15E−19 |
| 10 | 2 | 1.65E−19 | 5.49E−20 |
| 11 | 2 | 1.74E−16 | 7.42E−17 |
| 12 | 2 | 2.98E−16 | 8.87E−17 |
| 13 | 2 | 5.29E−14 | 1.45E−13 |
| 14 | 2 | 1.45E−13 | 5.90E−14 |
| 15 | 2 | 3.62E−13 | 1.65E−13 |
| 16 | 2 | 3.62E−13 | 1.65E−13 |
| 17 | 2 | 6.38E−13 | 3.61E−13 |
| 18 | 2 | 1.10E−12 | 5.19E−13 |
| 19 | 2 | 6.91E−12 | 3.38E−12 |
| 20 | 2 | 5.33E−12 | 3.21E−11 |
| 21 | 2 | 9.59E−12 | 8.71E−10 |
| 22 | 2 | 1.80E−11 | 6.37E−10 |
| 23 | 2 | 3.64E−11 | 2.03E−11 |
| 24 | 2 | 3.64E−11 | 2.03E−11 |
| 25 | 2 | 6.67E−11 | 3.63E−11 |
| 26 | 2 | 5.50E−11 | 4.78E−09 |
| 27 | 2 | 1.68E−10 | 1.06E−09 |
| 28 | 2 | 8.58E−10 | 2.16E−08 |
| 29 | 2 | 1.06E−09 | 2.10E−08 |
| 30 | 2 | 2.23E−09 | 3.77E−08 |
| 31 | 2 | 2.23E−09 | 3.77E−08 |
| 32 | 2 | 1.72E−08 | 2.02E−07 |
| 33 | 2 | 1.82E−08 | 1.76E−06 |
| 34 | 2 | 3.52E−08 | 8.59E−08 |
| 35 | 2 | 4.21E−08 | 6.33E−08 |
| 36 | 2 | 5.50E−08 | 7.64E−08 |
| 37 | 2 | 1.40E−07 | 9.94E−08 |
| 38 | 2 | 1.81E−07 | 3.88E−07 |
| 39 | 2 | 1.97E−07 | 2.71E−07 |
| 40 | 2 | 2.16E−07 | 2.91E−07 |
| 41 | 2 | 2.16E−07 | 7.75E−07 |
| 42 | 2 | 7.51E−07 | 2.30E−07 |
| 43 | 2 | 3.06E−07 | 8.87E−07 |
| 44 | 2 | 2.22E−06 | 3.49E−07 |
| 45 | 2 | 1.28E−06 | 4.35E−07 |
| 46 | 2 | 1.28E−06 | 4.35E−07 |
| 47 | 2 | 1.25E−06 | 4.35E−07 |
| 48 | 2 | 2.83E−06 | 7.62E−07 |
| 49 | 2 | 1.23E−06 | 8.72E−07 |
| 50 | 2 | 4.30E−06 | 8.72E−07 |

TABLE 18d
Data for Salmonella species (continued)

| No. | Locus.Tag | Gene.Symbol | GenBank.Accession | Chromosome |
|---|---|---|---|---|
| 1 | SeHA_C1580 | blaT | YP_002045448 | |
| 2 | SeSA_B0079 | | YP_002112958 | plasmid pCVM19633_110 |
| 3 | HMPREF9547_03104 | | ZP_07169558 | |
| 4 | KPN_pKPN5p08201 | | YP_001338811 | plasmid pKPN5 |
| 5 | ETAE_p041 | folP | YP_003297635 | plasmid pEIB202 |
| 6 | Salmoentericaenterica_010100000245 | | ZP_02702077 | |
| 7 | pEFER_0049 | | YP_002394596 | plasmid pEFER |
| 8 | HMPREF9345_05066 | | ZP_07100147 | |
| 9 | ETAE_p040 | | YP_003297634 | plasmid pEIB202 |
| 10 | EcolB_01004576 | | ZP_00708527 | |
| 11 | HMPREF9538_04737 | | ZP_08307036 | |
| 12 | HMPREF9548_03784 | | ZP_07141588 | |
| 13 | SFxv_1142 | | ADA73400 | |
| 14 | SSON_3896 | aadA | YP_312670 | |
| 15 | HMPREF9551_04611 | | ZP_07191964 | |
| 16 | Salmoentericaenterica_010100000130 | | ZP_02702054 | |
| 17 | KPN_pKPN4p07064 | | YP_001338673 | plasmid pKPN4 |
| 18 | Salmoentericaenterica_010100000105 | | ZP_02702049 | |
| 19 | HMPREF9345_03525 | | ZP_07098656 | |
| 20 | HMPREF9347_06051 | | ZP_07213485 | |
| 21 | SFxv_1141 | | ADA73399 | |
| 22 | SeHA_A0031 | | YP_002043869 | plasmid pSL476_91 |
| 23 | STMDT12_C39390 | | BAJ38882 | |
| 24 | KPN_pKPN4p07068 | merC | YP_001338677 | plasmid pKPN4 |
| 25 | SeSA_B0082 | | YP_002112961 | plasmid pCVM19633_110 |
| 26 | ESCAB7627_0644 | | ZP_02900823 | |
| 27 | STM474_p303 | repA | ADX20580 | plasmid TY474p3 |
| 28 | SPC_p013 | rsdB | YP_002635587 | plasmid pSPCV |
| 29 | SSO_P190 | traD | YP_313445 | plasmid pSS_046 |
| 30 | CP0245 | mvpA | NP_858378 | plasmid pCP301 |
| 31 | PSLT105 | trbH | NP_490589 | plasmid pSLT |
| 32 | STM14_5622 | traD | ACY86531 | |
| 33 | ESCAB7627_0650 | | ZP_02900555 | |
| 34 | SPC_p042 | traX | YP_002635616 | plasmid pSPCV |
| 35 | SPC_2707 | | YP_002638248 | |
| 36 | STM474_1038 | | ADX16744 | |
| 37 | Senterienterica_010100019467 | | ZP_02668762 | |
| 38 | SPC_p041 | finO | YP_002635615 | plasmid pSPCV |
| 39 | SPC_2708 | | YP_002638249 | |
| 40 | STM1046 | | NP_460021 | |
| 41 | STM474_p1093 | ccdB | ADX20463 | plasmid TY474p1 |
| 42 | Sentent_010100022581 | | ZP_02341659 | |
| 43 | SPAB_05276 | | YP_001591385 | |
| 44 | STMDT12_C10780 | | BAJ36021 | |
| 45 | SARI_01515 | | YP_001570553 | |
| 46 | SARI_01514 | | YP_001570552 | |
| 47 | SBG_1292 | malR | YP_004730162 | |
| 48 | Senterienterica_010100019192 | | ZP_02668707 | |
| 49 | SPC_0340 | | YP_002635966 | |
| 50 | Senteenterica_010100025269 | | ZP_02664569 | |

TABLE 18e
Data for Salmonella species (continued)

| No. | Start.Coord | End.Coord | Strand | Scaffold.ID |
|---|---|---|---|---|
| 1 | 1525960 | 1526820 | + | 642555218 |
| 2 | 68933 | 70240 | + | 642555219 |
| 3 | 3248 | 3841 | + | 648291919 |
| 4 | 34908 | 35255 | − | 640753021 |
| 5 | 32101 | 32916 | − | 646311959 |
| 6 | 36757 | 37062 | + | 641778223 |
| 7 | 48658 | 49503 | + | 643692014 |
| 8 | 4715 | 5554 | − | 648294624 |
| 9 | 31237 | 32040 | − | 646311959 |
| 10 | 3555 | 4568 | + | 638359041 |
| 11 | 1555 | 2055 | − | 651333542 |
| 12 | 8819 | 9535 | + | 648288593 |
| 13 | 1108351 | 1108854 | − | 646862363 |
| 14 | 4110458 | 4111246 | − | 640427102 |
| 15 | 97 | 531 | − | 648293053 |
| 16 | 19257 | 19691 | + | 641778223 |
| 17 | 23310 | 24614 | − | 640753020 |
| 18 | 16271 | 16636 | − | 641778223 |
| 19 | 1071 | 1307 | − | 648294596 |
| 20 | 812 | 1663 | − | 648294425 |
| 21 | 1107342 | 1107968 | + | 646862363 |
| 22 | 16416 | 17195 | + | 642555216 |
| 23 | 4088051 | 4088326 | − | 651053007 |
| 24 | 25970 | 27664 | − | 640753020 |
| 25 | 71061 | 71411 | − | 642555219 |
| 26 | 233492 | 234697 | − | 641784575 |
| 27 | 1988 | 2827 | − | 650378006 |
| 28 | 10060 | 10842 | − | 643692029 |
| 29 | 166425 | 168626 | + | 640427103 |
| 30 | 198117 | 198515 | − | 637000224 |
| 31 | 86566 | 87285 | + | 637000134 |
| 32 | 84297 | 86459 | + | 646862361 |
| 33 | 238788 | 239996 | − | 641784575 |
| 34 | 28413 | 29153 | − | 643692029 |
| 35 | 2745099 | 2745596 | − | 643692030 |
| 36 | 1088568 | 1089272 | + | 650378003 |
| 37 | 62341 | 62874 | − | 641777794 |
| 38 | 27795 | 28358 | − | 643692029 |
| 39 | 2745695 | 2746027 | − | 643692030 |
| 40 | 1131381 | 1132118 | + | 637000122 |
| 41 | 73221 | 73526 | − | 650378004 |
| 42 | 23575 | 23910 | − | 641746440 |
| 43 | 4445787 | 4448009 | + | 641228523 |
| 44 | 1141208 | 1141399 | − | 651053007 |
| 45 | 1476854 | 1478026 | + | 641228515 |
| 46 | 1475252 | 1476844 | + | 641228515 |
| 47 | 1414087 | 1415115 | + | 650716177 |
| 48 | 26832 | 28046 | + | 641777794 |
| 49 | 367421 | 368839 | + | 643692030 |
| 50 | 35858 | 36535 | − | 641777693 |

### Example 10

### Serratia, particularly Serratia marcescens

[0282] The procedure was carried out as in Example 1, except that the following microorganisms were used:

[0283] Bacterial Strains

[0284] The inventors selected 437 Serratia strains from the microbiology strain collection at Siemens Healthcare Diagnostics (West Sacramento, Calif.) for susceptibility testing and whole genome sequencing.

[0285] From MetaRef, 1671 centroids of Serratia species were used as reference sequences.

[0286] The results for Serratia are shown in Tables 19 (corresponding to Table 1) and 20 (corresponding to Table 2).

TABLE 19a
Data for Serratia, particularly Serratia marcescens

| | Scaffold.External. | | |
|---|---|---|---|
| No. | Accession | Scaffold.Name | best_pv |
| 1 | NC_009832 | Serratia proteamaculans 568: NC_009832 | 3.70422109249874e−06 |
| 2 | NZ_ADBY01000058 | Serratia odorifera DSM 4582 contig00061: NZ_ADBY01000058 | 6.00624466630552e−06 |
| 3 | NZ_ADBY01000056 | Serratia odorifera DSM 4582 contig00059: NZ_ADBY01000056 | 6.00624466630552e−06 |
| 4 | NZ_ADBY01000031 | Serratia odorifera DSM 4582 contig00034: NZ_ADBY01000031 | 8.61505367610747e−06 |
| 5 | NZ_GL636422 | Serratia symbiotica str. Tucson genomic scaffold contig09350: | 8.61505367610747e−06 |
| | | NZ_GL636422 | |
| 6 | NZ_ADBX01000013 | Serratia odorifera 4Rx13 SODm: NZ_ADBX01000013 | 8.61505367610747e−06 |
| 7 | NZ_ADBX01000004 | Serratia odorifera 4Rx13 SODd: NZ_ADBX01000004 | 1.33354783010227e−05 |
| 8 | NC_009832 | Serratia proteamaculans 568: NC_009832 | 1.37889112422256e−05 |
| 9 | NZ_ADBX01000010 | Serratia odorifera 4Rx13 SODj: NZ_ADBX01000010 | 1.55998636550055e−05 |
| 10 | NZ_ADBX01000013 | Serratia odorifera 4Rx13 SODm: NZ_ADBX01000013 | 1.55998636550055e−05 |
| 11 | NZ_GL636105 | Serratia symbiotica str. Tucson genomic scaffold scaffold00209: | 1.55998636550055e−05 |
| | | NZ_GL636105 | |
| 12 | NC_014837 | Pantoea sp. At-9b chromosome: NC_014837 | 1.55998636550055e−05 |
| 13 | NZ_GL636364 | Serratia symbiotica str. Tucson genomic scaffold contig09039: | 1.55998636550055e−05 |
| | | NZ_GL636364 | |
| 14 | NC_009832 | Serratia proteamaculans 568: NC_009832 | 1.55998636550055e−05 |
| 15 | NZ_ADBY01000048 | Serratia odorifera DSM 4582 contig00051: NZ_ADBY01000048 | 2.17438866604963e−05 |
| 16 | NZ_ADBX01000002 | Serratia odorifera 4Rx13 SODb: NZ_ADBX01000002 | 2.94809945975299e−05 |
| 17 | NZ_ADBY01000031 | Serratia odorifera DSM 4582 contig00034: NZ_ADBY01000031 | 3.13750499443641e−05 |
| 18 | NZ_ADBY01000045 | Serratia odorifera DSM 4582 contig00048: NZ_ADBY01000045 | 3.13750499443641e−05 |
| 19 | NZ_ADBY01000031 | Serratia odorifera DSM 4582 contig00034: NZ_ADBY01000031 | 3.13750499443641e−05 |
| 20 | NZ_ADBY01000058 | Serratia odorifera DSM 4582 contig00061: NZ_ADBY01000058 | 3.13750499443641e−05 |
| 21 | NZ_ADBX01000002 | Serratia odorifera 4Rx13 SODb: NZ_ADBX01000002 | 3.43966250408489e−05 |
| 22 | NZ_ADBY01000050 | Serratia odorifera DSM 4582 contig00053: NZ_ADBY01000050 | 3.66332257629745e−05 |
| 23 | NZ_ADBY01000013 | Serratia odorifera DSM 4582 contig00016: NZ_ADBY01000013 | 3.7147650177074e−05 |
| 24 | NZ_ADBY01000056 | Serratia odorifera DSM 4582 contig00059: NZ_ADBY01000056 | 3.7147650177074e−05 |
| 25 | NZ_ADBY01000026 | Serratia odorifera DSM 4582 contig00029: NZ_ADBY01000026 | 3.7147650177074e−05 |
| 26 | NZ_ADBX01000001 | Serratia odorifera 4Rx13 SODa: NZ_ADBX01000001 | 3.77977323028027e−05 |
| 27 | NZ_ADBY01000057 | Serratia odorifera DSM 4582 contig00060: NZ_ADBY01000057 | 4.06693999812307e−05 |
| 28 | NC_009832 | Serratia proteamaculans 568: NC_009832 | 4.06693999812307e−05 |
| 29 | NZ_ADBY01000057 | Serratia odorifera DSM 4582 contig00060: NZ_ADBY01000057 | 4.06693999812307e−05 |
| 30 | NZ_ADBX01000013 | Serratia odorifera 4Rx13 SODm: NZ_ADBX01000013 | 4.06693999812307e−05 |
| 31 | NZ_ADBY01000031 | Serratia odorifera DSM 4582 contig00034: NZ_ADBY01000031 | 4.20000578456372e−05 |
| 32 | NZ_ADBX01000002 | Serratia odorifera 4Rx13 SODb: NZ_ADBX01000002 | 5.02288669357547e−05 |
| 33 | NZ_ADBX01000002 | Serratia odorifera 4Rx13 SODb: NZ_ADBX01000002 | 5.02288669357547e−05 |
| 34 | NZ_ADBX01000003 | Serratia odorifera 4Rx13 SODc: NZ_ADBX01000003 | 5.02288669357547e−05 |
| 35 | NC_009832 | Serratia proteamaculans 568: NC_009832 | 5.02288669357547e−05 |
| 36 | NC_009832 | Serratia proteamaculans 568: NC_009832 | 5.02288669357547e−05 |
| 37 | NC_009832 | Serratia proteamaculans 568: NC_009832 | 5.02288669357547e−05 |
| 38 | NZ_ADBX01000004 | Serratia odorifera 4Rx13 SODd: NZ_ADBX01000004 | 5.02288669357547e−05 |
| 39 | NZ_GG657374 | Citrobacter sp. 30_2 genomic scaffold supercont1.9: NZ_GG657374 | 5.02288669357547e−05 |
| 40 | NC_009832 | Serratia proteamaculans 568: NC_009832 | 5.02288669357547e−05 |
| 41 | NC_009832 | Serratia proteamaculans 568: NC_009832 | 5.02288669357547e−05 |
| 42 | NC_009832 | Serratia proteamaculans 568: NC_009832 | 5.02288669357547e−05 |
| 43 | NZ_ADBX01000001 | Serratia odorifera 4Rx13 SODa: NZ_ADBX01000001 | 5.02288669357547e−05 |
| 44 | NZ_ADBX01000004 | Serratia odorifera 4Rx13 SODd: NZ_ADBX01000004 | 5.02288669357547e−05 |
| 45 | NZ_ADBX01000002 | Serratia odorifera 4Rx13 SODb: NZ_ADBX01000002 | 5.02288669357547e−05 |
| 46 | NZ_ADBY01000056 | Serratia odorifera DSM 4582 contig00059: NZ_ADBY01000056 | 5.02288669357547e−05 |
| 47 | NZ_ADBY01000032 | Serratia odorifera DSM 4582 contig00035: NZ_ADBY01000032 | 5.02288669357547e−05 |
| 48 | NZ_ADBY01000013 | Serratia odorifera DSM 4582 contig00016: NZ_ADBY01000013 | 5.88044402302405e−05 |
| 49 | NC_009832 | Serratia proteamaculans 568: NC_009832 | 6.62251962114689e−05 |
| 50 | NC_009832 | Serratia proteamaculans 568: NC_009832 | 7.15986854143193e−05 |

TABLE 19b
Data for Serratia, particularly Serratia marcescens (continued)

| No. | sign_phenos | sign_phenos_class | best_pheno | best_pheno_class |
|---|---|---|---|---|
| 1 | AZT; CAX; CAZ; CFT; CP; GM; LVX; P/T; TO; T/S | aminoglycoside; fluoroquinolone; lactam; other | LVX | fluoroquinolone |
| 2 | CP; LVX; T/S | fluoroquinolone; other | CP | fluoroquinolone |
| 3 | AZT; CAX; CP; LVX; T/S | fluoroquinolone; lactam; other | LVX | fluoroquinolone |
| 4 | AZT; CAX; CFT; CP; LVX; P/T; T/S | fluoroquinolone; lactam; other | LVX | fluoroquinolone |
| 5 | CAX; CAZ; CFT; CP; LVX; P/T | fluoroquinolone; lactam | CP | fluoroquinolone |
| 6 | AZT; CAX; CAZ; CFT; CP; LVX; P/T | fluoroquinolone; lactam | CP | fluoroquinolone |
| 7 | CAX; CFT; CP; LVX | fluoroquinolone; lactam | LVX | fluoroquinolone |
| 8 | CAX; CFT; CP; LVX; T/S | fluoroquinolone; lactam; other | LVX | fluoroquinolone |
| 9 | CAX; CFT; CP; LVX; TO | aminoglycoside; fluoroquinolone; lactam | LVX | fluoroquinolone |
| 10 | AZT; CAX; CAZ; CFT; CP; LVX; P/T | fluoroquinolone; lactam | CP | fluoroquinolone |
| 11 | AZT; CAX; CAZ; CFT; CP; P/T | fluoroquinolone; lactam | CAX | lactam |
| 12 | CAX; CFT; CP; GM; LVX; P/T; TO; T/S | aminoglycoside; fluoroquinolone; lactam; other | LVX | fluoroquinolone |
| 13 | AZT; CAX; CAZ; CFT; CP; P/T | fluoroquinolone; lactam | CAX | lactam |
| 14 | CP; LVX | fluoroquinolone | LVX | fluoroquinolone |
| 15 | AZT; CAX; CFT; CP; GM; LVX; P/T; TO; T/S | aminoglycoside; fluoroquinolone; lactam; other | LVX | fluoroquinolone |
| 16 | AZT; CAX; CFT; CP; GM; LVX; P/T; TO; T/S | aminoglycoside; fluoroquinolone; lactam; other | LVX | fluoroquinolone |
| 17 | AZT; CAX; CFT; CP; LVX; P/T; T/S | fluoroquinolone; lactam; other | LVX | fluoroquinolone |
| 18 | CAX; CFT; CP; GM; LVX; P/T; TO; T/S | aminoglycoside; fluoroquinolone; lactam; other | LVX | fluoroquinolone |
| 19 | AZT; CAX; CFT; CP; LVX; P/T; T/S | fluoroquinolone; lactam; other | LVX | fluoroquinolone |
| 20 | AZT; CAX; CFT; CP; GM; LVX; P/T; TO; T/S | aminoglycoside; fluoroquinolone; lactam; other | LVX | fluoroquinolone |
| 21 | CAX; CP; LVX; T/S | fluoroquinolone; lactam; other | LVX | fluoroquinolone |
| 22 | AZT; CAX; CFT; CP; GM; LVX; P/T; TO; T/S | aminoglycoside; fluoroquinolone; lactam; other | LVX | fluoroquinolone |
| 23 | CAX; CFT; CP; GM; LVX; P/T; TO; T/S | aminoglycoside; fluoroquinolone; lactam; other | CP | fluoroquinolone |
| 24 | AZT; CAX; CAZ; CFT; P/T | lactam | CAZ | lactam |
| 25 | CAX; CFT; CP; GM; LVX; P/T | aminoglycoside; fluoroquinolone; lactam | LVX | fluoroquinolone |
| 26 | AZT; CAX; CFT; CP; GM; LVX; P/T; TO; T/S | aminoglycoside; fluoroquinolone; lactam; other | LVX | fluoroquinolone |
| 27 | AZT; CAZ; CFT; CP; TO | aminoglycoside; fluoroquinolone; lactam | CP | fluoroquinolone |
| 28 | CAX; CP; LVX | fluoroquinolone; lactam | LVX | fluoroquinolone |
| 29 | AZT; CAZ; CFT; CP; TO | aminoglycoside; fluoroquinolone; lactam | CP | fluoroquinolone |
| 30 | AZT; CAZ; CFT; CP; TO | aminoglycoside; fluoroquinolone; lactam | CP | fluoroquinolone |
| 31 | CAX; CFT; CP; LVX; P/T; T/S | fluoroquinolone; lactam; other | P/T | lactam |
| 32 | AZT; CAX; CFT; CP; GM; LVX; P/T; TO; T/S | aminoglycoside; fluoroquinolone; lactam; other | LVX | fluoroquinolone |
| 33 | CAX; CFT; CP; LVX; T/S | fluoroquinolone; lactam; other | LVX | fluoroquinolone |
| 34 | CAX; CFT; CP; LVX; T/S | fluoroquinolone; lactam; other | LVX | fluoroquinolone |
| 35 | AZT; CAX; CFT; CP; GM; LVX; P/T; TO; T/S | aminoglycoside; fluoroquinolone; lactam; other | LVX | fluoroquinolone |
| 36 | AZT; CAX; CFT; CP; LVX; T/S | fluoroquinolone; lactam; other | CP | fluoroquinolone |
| 37 | AZT; CAX; CFT; CP; GM; LVX; P/T; TO; T/S | aminoglycoside; fluoroquinolone; lactam; other | LVX | fluoroquinolone |
| 38 | CAX; CFT; CP; LVX; P/T; T/S | fluoroquinolone; lactam; other | LVX | fluoroquinolone |
| 39 | CP; GM; LVX; TO; T/S | aminoglycoside; fluoroquinolone; other | LVX | fluoroquinolone |
| 40 | CAX; CFT; CP; LVX; P/T; T/S | fluoroquinolone; lactam; other | LVX | fluoroquinolone |
| 41 | AZT; CAX; CFT; CP; GM; LVX; P/T; TO; T/S | aminoglycoside; fluoroquinolone; lactam; other | LVX | fluoroquinolone |
| 42 | AZT; CAX; CFT; CP; GM; LVX; P/T; TO; T/S | aminoglycoside; fluoroquinolone; lactam; other | LVX | fluoroquinolone |
| 43 | CP; LVX; P/T | fluoroquinolone; lactam | LVX | fluoroquinolone |
| 44 | CAX; CFT; CP; LVX; T/S | fluoroquinolone; lactam; other | LVX | fluoroquinolone |
| 45 | AZT; CAX; CFT; CP; GM; LVX; P/T; TO; T/S | aminoglycoside; fluoroquinolone; lactam; other | LVX | fluoroquinolone |
| 46 | AZT; CAX; CAZ | lactam | CAZ | lactam |
| 47 | AZT; CAX; CFT; CP; GM; LVX; TO; T/S | aminoglycoside; fluoroquinolone; lactam; other | LVX | fluoroquinolone |
| 48 | CAX; CFT; CP; LVX; P/T | fluoroquinolone; lactam | LVX | fluoroquinolone |
| 49 | CAX; CFT; CP; LVX | fluoroquinolone; lactam | LVX | fluoroquinolone |
| 50 | AZT; CAX; CFT; CP; GM; LVX; P/T; TO; T/S | aminoglycoside; fluoroquinolone; lactam; other | LVX | fluoroquinolone |

TABLE 19c
Data for Serratia, particularly Serratia marcescens (continued)

| No. | num_aminoglycoside | num_fluoroquinolone | num_lactam | num_other |
|---|---|---|---|---|
| 1 | 2 | 2 | 5 | 1 |
| 2 | 0 | 2 | 0 | 1 |
| 3 | 0 | 2 | 2 | 1 |
| 4 | 0 | 2 | 4 | 1 |
| 5 | 0 | 2 | 4 | 0 |
| 6 | 0 | 2 | 5 | 0 |
| 7 | 0 | 2 | 2 | 0 |
| 8 | 0 | 2 | 2 | 1 |
| 9 | 1 | 2 | 2 | 0 |
| 10 | 0 | 2 | 5 | 0 |
| 11 | 0 | 1 | 5 | 0 |
| 12 | 2 | 2 | 3 | 1 |
| 13 | 0 | 1 | 5 | 0 |
| 14 | 0 | 2 | 0 | 0 |
| 15 | 2 | 2 | 4 | 1 |
| 16 | 2 | 2 | 4 | 1 |
| 17 | 0 | 2 | 4 | 1 |
| 18 | 2 | 2 | 3 | 1 |
| 19 | 0 | 2 | 4 | 1 |
| 20 | 2 | 2 | 4 | 1 |
| 21 | 0 | 2 | 1 | 1 |
| 22 | 2 | 2 | 4 | 1 |
| 23 | 2 | 2 | 3 | 1 |
| 24 | 0 | 0 | 5 | 0 |
| 25 | 1 | 2 | 3 | 0 |
| 26 | 2 | 2 | 4 | 1 |
| 27 | 1 | 1 | 3 | 0 |
| 28 | 0 | 2 | 1 | 0 |
| 29 | 1 | 1 | 3 | 0 |
| 30 | 1 | 1 | 3 | 0 |
| 31 | 0 | 2 | 3 | 1 |
| 32 | 2 | 2 | 4 | 1 |
| 33 | 0 | 2 | 2 | 1 |
| 34 | 0 | 2 | 2 | 1 |
| 35 | 2 | 2 | 4 | 1 |
| 36 | 0 | 2 | 3 | 1 |
| 37 | 2 | 2 | 4 | 1 |
| 38 | 0 | 2 | 3 | 1 |
| 39 | 2 | 2 | 0 | 1 |
| 40 | 0 | 2 | 3 | 1 |
| 41 | 2 | 2 | 4 | 1 |
| 42 | 2 | 2 | 4 | 1 |
| 43 | 0 | 2 | 1 | 0 |
| 44 | 0 | 2 | 2 | 1 |
| 45 | 2 | 2 | 4 | 1 |
| 46 | 0 | 0 | 3 | 0 |
| 47 | 2 | 2 | 3 | 1 |
| 48 | 0 | 2 | 3 | 0 |
| 49 | 0 | 2 | 2 | 0 |
| 50 | 2 | 2 | 4 | 1 |

TABLE 19d
Data for Serratia, particularly Serratia marcescens (continued)

| No. | AZT_pv_adj | CAX_pv_adj | CAZ_pv_adj | CFT_pv_adj | CP_pv_adj |
|---|---|---|---|---|---|
| 1 | 4.82E−04 | 5.24E−04 | 6.41E−03 | 7.29E−04 | 2.27E−05 |
| 2 | 1.58E−01 | 1.39E−01 | 2.26E−01 | 3.68E−02 | 6.01E−06 |
| 3 | 6.77E−04 | 8.30E−03 | 2.51E−02 | 1.65E−02 | 2.17E−05 |
| 4 | 8.92E−03 | 3.01E−03 | 3.16E−01 | 7.90E−03 | 2.95E−05 |
| 5 | 1.60E−02 | 4.77E−04 | 5.25E−03 | 1.36E−04 | 8.62E−06 |
| 6 | 1.22E−03 | 1.22E−03 | 1.24E−03 | 4.08E−04 | 8.62E−06 |
| 7 | 3.82E−02 | 3.55E−03 | 4.51E−02 | 2.17E−03 | 7.86E−05 |
| 8 | 1.48E−01 | 5.09E−03 | 6.93E−02 | 4.93E−03 | 1.10E−04 |
| 9 | 4.53E−02 | 5.02E−03 | 3.12E−01 | 2.64E−03 | 5.13E−04 |
| 10 | 6.43E−04 | 1.61E−04 | 7.67E−04 | 8.45E−05 | 1.56E−05 |
| 11 | 3.67E−05 | 1.56E−05 | 1.56E−05 | 5.02E−05 | 6.54E−03 |
| 12 | 1.44E−02 | 6.36E−03 | 4.83E−02 | 3.41E−03 | 2.36E−04 |
| 13 | 3.67E−05 | 1.56E−05 | 1.56E−05 | 5.02E−05 | 6.54E−03 |
| 14 | 4.07E−01 | 5.36E−02 | 7.62E−01 | 4.93E−02 | 5.86E−04 |
| 15 | 1.11E−03 | 7.67E−04 | 4.28E−02 | 1.04E−03 | 4.94E−05 |
| 16 | 6.43E−04 | 1.24E−03 | 2.38E−02 | 2.68E−03 | 1.82E−04 |
| 17 | 4.26E−03 | 1.84E−03 | 6.64E−02 | 4.93E−03 | 1.22E−04 |
| 18 | 1.73E−02 | 1.76E−04 | 2.04E−02 | 5.24E−04 | 6.30E−04 |
| 19 | 4.26E−03 | 1.84E−03 | 6.64E−02 | 4.93E−03 | 1.22E−04 |
| 20 | 9.20E−04 | 1.82E−04 | 2.34E−02 | 1.48E−04 | 1.69E−04 |
| 21 | 2.19E−02 | 6.70E−03 | 1 | 2.46E−02 | 7.82E−04 |
| 22 | 1.55E−03 | 4.30E−04 | 6.08E−02 | 5.90E−04 | 1.52E−04 |
| 23 | 4.85E−02 | 7.20E−04 | 1.01E−01 | 6.90E−04 | 3.71E−05 |
| 24 | 2.28E−03 | 2.41E−03 | 3.71E−05 | 4.23E−03 | 1.66E−01 |
| 25 | 1.01E−02 | 3.27E−04 | 5.44E−02 | 4.95E−04 | 7.62E−04 |
| 26 | 8.18E−04 | 3.20E−04 | 4.45E−02 | 3.27E−04 | 1.53E−04 |
| 27 | 5.89E−04 | 1.07E−02 | 1.19E−03 | 3.35E−03 | 4.07E−05 |
| 28 | 2.82E−02 | 6.08E−03 | 2.88E−01 | 4.51E−02 | 1.10E−04 |
| 29 | 5.89E−04 | 1.07E−02 | 1.19E−03 | 3.35E−03 | 4.07E−05 |
| 30 | 5.89E−04 | 1.07E−02 | 1.19E−03 | 3.35E−03 | 4.07E−05 |
| 31 | 5.92E−02 | 3.15E−04 | 6.50E−01 | 1.11E−03 | 6.89E−03 |
| 32 | 1.66E−03 | 6.30E−04 | 8.28E−02 | 6.43E−04 | 3.33E−04 |
| 33 | 5.14E−02 | 1.60E−03 | 5.77E−02 | 2.64E−03 | 1.17E−03 |
| 34 | 5.14E−02 | 1.60E−03 | 5.77E−02 | 2.64E−03 | 1.17E−03 |
| 35 | 1.17E−03 | 3.15E−04 | 5.90E−02 | 3.27E−04 | 3.15E−04 |
| 36 | 1.07E−03 | 3.99E−03 | 2.05E−02 | 2.84E−03 | 5.02E−05 |
| 37 | 1.16E−03 | 5.89E−04 | 5.88E−02 | 6.07E−04 | 2.32E−04 |
| 38 | 4.11E−02 | 1.55E−03 | 5.76E−02 | 2.12E−03 | 1.15E−03 |
| 39 | 2.08E−02 | 2.04E−02 | 2.72E−01 | 3.09E−02 | 3.33E−04 |
| 40 | 5.14E−02 | 1.13E−03 | 5.80E−02 | 1.53E−03 | 1.50E−03 |
| 41 | 1.17E−03 | 3.15E−04 | 5.90E−02 | 3.27E−04 | 3.15E−04 |
| 42 | 4.30E−03 | 1.43E−03 | 1.74E−01 | 2.47E−03 | 9.38E−04 |
| 43 | 8.63E−02 | 1.24E−02 | 2.31E−01 | 1.12E−02 | 7.34E−04 |
| 44 | 5.14E−02 | 2.07E−03 | 5.80E−02 | 2.73E−03 | 1.50E−03 |
| 45 | 1.17E−03 | 3.15E−04 | 5.90E−02 | 3.27E−04 | 3.15E−04 |
| 46 | 2.22E−03 | 6.95E−03 | 5.02E−05 | 1.63E−02 | 4.21E−01 |
| 47 | 7.04E−03 | 6.21E−03 | 3.82E−02 | 3.31E−03 | 1.04E−04 |
| 48 | 3.16E−01 | 1.58E−03 | 5.58E−01 | 1.57E−03 | 7.78E−04 |
| 49 | 2.46E−02 | 8.70E−03 | 2.31E−01 | 5.07E−03 | 1.80E−03 |
| 50 | 1.55E−03 | 7.82E−04 | 5.97E−02 | 8.10E−04 | 3.15E−04 |

TABLE 19e
Data for Serratia, particularly Serratia marcescens (continued)

| No. | GM_pv_adj | LVX_pv_adj | P/T_pv_adj | TO_pv_adj | T/S_pv_adj |
|---|---|---|---|---|---|
| 1 | 7.29E−04 | 3.70E−06 | 4.19E−03 | 5.65E−04 | 2.79E−04 |
| 2 | 3.92E−02 | 8.62E−06 | 5.32E−01 | 5.08E−02 | 9.68E−03 |
| 3 | 3.60E−02 | 6.01E−06 | 4.96E−02 | 9.86E−02 | 1.55E−03 |
| 4 | 2.38E−01 | 8.62E−06 | 4.51E−04 | 1.33E−01 | 5.10E−03 |
| 5 | 2.87E−01 | 4.05E−04 | 5.63E−05 | 3.66E−02 | 2.11E−02 |
| 6 | 9.01E−01 | 8.10E−04 | 6.41E−03 | 4.07E−02 | 1.63E−01 |
| 7 | 3.66E−02 | 1.33E−05 | 1.49E−02 | 1.15E−02 | 2.81E−02 |
| 8 | 1.16E−01 | 1.38E−05 | 1.31E−02 | 6.43E−02 | 5.52E−03 |
| 9 | 1.25E−02 | 1.56E−05 | 5.88E−02 | 1.37E−03 | 3.00E−02 |
| 10 | 2.58E−01 | 1.22E−04 | 9.05E−05 | 4.31E−02 | 3.97E−02 |
| 11 | 2.06E−01 | 3.60E−01 | 3.67E−05 | 1.87E−01 | 3.72E−01 |
| 12 | 5.33E−03 | 1.56E−05 | 6.87E−03 | 3.46E−03 | 8.20E−03 |
| 13 | 2.06E−01 | 3.60E−01 | 3.67E−05 | 1.87E−01 | 3.72E−01 |
| 14 | 4.95E−02 | 1.56E−05 | 1.34E−01 | 1.43E−01 | 2.07E−02 |
| 15 | 2.56E−03 | 2.17E−05 | 2.35E−03 | 3.96E−03 | 4.94E−04 |
| 16 | 3.89E−04 | 2.95E−05 | 1.52E−03 | 3.51E−03 | 2.43E−03 |
| 17 | 1.48E−01 | 3.14E−05 | 2.32E−04 | 8.78E−02 | 5.89E−04 |
| 18 | 3.24E−03 | 3.14E−05 | 2.41E−03 | 4.32E−03 | 4.63E−03 |
| 19 | 1.48E−01 | 3.14E−05 | 2.32E−04 | 8.78E−02 | 5.89E−04 |
| 20 | 2.78E−03 | 3.14E−05 | 1.10E−03 | 2.42E−03 | 6.75E−04 |
| 21 | 2.77E−02 | 3.44E−05 | 5.49E−02 | 1.12E−01 | 1.40E−03 |
| 22 | 5.63E−03 | 3.66E−05 | 3.16E−03 | 5.49E−03 | 3.24E−03 |
| 23 | 3.72E−03 | 4.07E−05 | 1.76E−03 | 4.82E−03 | 3.60E−03 |
| 24 | 2.22E−01 | 1 | 9.74E−03 | 1.18E−01 | 2.81E−01 |
| 25 | 4.82E−03 | 3.71E−05 | 7.82E−04 | 2.06E−02 | 1.08E−02 |
| 26 | 1.24E−03 | 3.78E−05 | 1.36E−03 | 2.34E−03 | 1.55E−03 |
| 27 | 6.23E−01 | 1.02E−02 | 5.43E−02 | 8.38E−03 | 8.82E−02 |
| 28 | 5.36E−02 | 4.07E−05 | 4.63E−02 | 3.92E−02 | 1.38E−02 |
| 29 | 6.23E−01 | 1.02E−02 | 5.43E−02 | 8.38E−03 | 8.82E−02 |
| 30 | 6.23E−01 | 1.02E−02 | 5.43E−02 | 8.38E−03 | 8.82E−02 |
| 31 | 1.41E−01 | 7.82E−04 | 4.20E−05 | 3.04E−02 | 5.10E−03 |
| 32 | 2.77E−03 | 5.02E−05 | 1.37E−03 | 5.69E−03 | 2.21E−03 |
| 33 | 1.47E−02 | 5.02E−05 | 1.03E−02 | 3.27E−02 | 6.75E−03 |
| 34 | 1.47E−02 | 5.02E−05 | 1.03E−02 | 3.27E−02 | 6.75E−03 |
| 35 | 1.76E−03 | 5.02E−05 | 1.07E−03 | 4.09E−03 | 2.26E−03 |
| 36 | 2.27E−02 | 3.89E−04 | 4.16E−02 | 1.11E−02 | 6.71E−03 |
| 37 | 1.76E−03 | 5.02E−05 | 1.80E−03 | 3.17E−03 | 2.24E−03 |
| 38 | 1.48E−02 | 5.02E−05 | 8.05E−03 | 2.57E−02 | 6.70E−03 |
| 39 | 2.77E−03 | 5.02E−05 | 1.42E−02 | 2.41E−03 | 2.10E−04 |
| 40 | 1.48E−02 | 5.02E−05 | 5.52E−03 | 3.27E−02 | 6.89E−03 |
| 41 | 1.76E−03 | 5.02E−05 | 1.07E−03 | 4.09E−03 | 2.26E−03 |
| 42 | 1.31E−03 | 5.02E−05 | 5.93E−03 | 3.06E−03 | 2.21E−03 |
| 43 | 3.13E−02 | 5.02E−05 | 5.52E−03 | 1.02E−02 | 9.79E−02 |
| 44 | 1.48E−02 | 5.02E−05 | 1.06E−02 | 3.27E−02 | 6.89E−03 |
| 45 | 1.76E−03 | 5.02E−05 | 1.07E−03 | 4.09E−03 | 2.26E−03 |
| 46 | 2.06E−01 | 1 | 7.15E−02 | 3.33E−01 | 1.57E−01 |
| 47 | 9.28E−04 | 5.02E−05 | 6.47E−02 | 2.47E−03 | 1.76E−03 |
| 48 | 1.83E−02 | 5.88E−05 | 1.62E−03 | 1.34E−02 | 1.37E−02 |
| 49 | 9.13E−01 | 6.62E−05 | 6.12E−02 | 1.22E−01 | 1.54E−01 |
| 50 | 1.80E−03 | 7.16E−05 | 2.42E−03 | 4.20E−03 | 2.34E−03 |

TABLE 19f
Data for Serratia, particularly Serratia marcescens (continued)

| No. | Locus.Tag | Gene.Symbol | GenBank.Accession | Chromosome |
|---|---|---|---|---|
| 1 | Spro_0657 | | YP_001476891 | |
| 2 | HMPREF0758_4528 | | ZP_06641192 | |
| 3 | HMPREF0758_4282 | wrbA | ZP_06640946 | |
| 4 | HMPREF0758_1761 | | ZP_06638425 | |
| 5 | SSYM_0272 | | ZP_08040542 | |
| 6 | SOD_m00050 | | ZP_06193534 | |
| 7 | SOD_d02380 | | ZP_06191491 | |
| 8 | Spro_3910 | | YP_001480133 | |
| 9 | SOD_j00160 | | ZP_06193066 | |
| 10 | SOD_m00140 | | ZP_06193543 | |
| 11 | SSYM_0779 | | ZP_08038782 | |
| 12 | Pat9b_2844 | | YP_004116700 | |
| 13 | SSYM_0215 | | ZP_08040491 | |
| 14 | Spro_1286 | | YP_001477518 | |
| 15 | HMPREF0758_3087 | paaY | ZP_06639751 | |
| 16 | SOD_b04490 | | ZP_06190513 | |
| 17 | HMPREF0758_1765 | | ZP_06638429 | |
| 18 | HMPREF0758_2630 | deoR | ZP_06639294 | |
| 19 | HMPREF0758_1762 | vtaK | ZP_06638426 | |
| 20 | HMPREF0758_4768 | yedI | ZP_06641432 | |
| 21 | SOD_b01290 | | ZP_06190194 | |
| 22 | HMPREF0758_3449 | mdtJ | ZP_06640113 | |
| 23 | HMPREF0758_0340 | | ZP_06637004 | |
| 24 | HMPREF0758_4122 | dnaC | ZP_06640786 | |
| 25 | HMPREF0758_1641 | pepE | ZP_06638305 | |
| 26 | SOD_a01780 | | ZP_06189226 | |
| 27 | HMPREF0758_4410 | | ZP_06641074 | |
| 28 | Spro_0998 | | YP_001477230 | |
| 29 | HMPREF0758_4409 | | ZP_06641073 | |
| 30 | SOD_m00010 | | ZP_06193530 | |
| 31 | HMPREF0758_1747 | | ZP_06638411 | |
| 32 | SOD_b01600 | | ZP_06190225 | |
| 33 | SOD_b01460 | | ZP_06190211 | |
| 34 | SOD_c02470 | | ZP_06190898 | |
| 35 | Spro_2856 | | YP_001479085 | |
| 36 | Spro_1467 | | YP_001477699 | |
| 37 | Spro_1011 | | YP_001477243 | |
| 38 | SOD_d01640 | | ZP_06191418 | |
| 39 | CSAG_04704 | | ZP_04558356 | |
| 40 | Spro_0906 | | YP_001477140 | |
| 41 | Spro_2853 | | YP_001479082 | |
| 42 | Spro_4574 | | YP_001480795 | |
| 43 | SOD_a08590 | | ZP_06189897 | |
| 44 | SOD_d03490 | | ZP_06191602 | |
| 45 | SOD_b05060 | | ZP_06190570 | |
| 46 | HMPREF0758_4124 | cpaE | ZP_06640788 | |
| 47 | HMPREF0758_1879 | yhcC | ZP_06638543 | |
| 48 | HMPREF0758_0325 | apbE | ZP_06636989 | |
| 49 | Spro_2867 | | YP_001479096 | |
| 50 | Spro_0904 | | YP_001477138 | |

TABLE 19g
Data for Serratia, particularly Serratia marcescens (continued)

| No. | Start.Coord | End.Coord | Strand | Scaffold.ID |
|---|---|---|---|---|
| 1 | 721013 | 721786 | + | 640753091 |
| 2 | 113063 | 113683 | + | 647012891 |
| 3 | 196203 | 196802 | + | 647012889 |
| 4 | 14537 | 15286 | + | 647012864 |
| 5 | 1 | 622 | + | 651285392 |
| 6 | 5289 | 5756 | − | 647012829 |
| 7 | 276617 | 277270 | − | 647012820 |
| 8 | 4328564 | 4329223 | + | 640753091 |
| 9 | 10640 | 11029 | − | 647012826 |
| 10 | 12102 | 12680 | − | 647012829 |
| 11 | 54235 | 55095 | − | 651285075 |
| 12 | 3117915 | 3119003 | − | 649633106 |
| 13 | 1 | 203 | + | 651285334 |
| 14 | 1415512 | 1416153 | − | 640753091 |
| 15 | 166028 | 166624 | − | 647012881 |
| 16 | 563304 | 564224 | − | 647012818 |
| 17 | 17164 | 19063 | + | 647012864 |
| 18 | 1577 | 1921 | + | 647012878 |
| 19 | 15286 | 15990 | + | 647012864 |
| 20 | 357014 | 357931 | − | 647012891 |
| 21 | 207219 | 208373 | − | 647012818 |
| 22 | 144943 | 145311 | + | 647012883 |
| 23 | 46700 | 47314 | − | 647012846 |
| 24 | 40618 | 41358 | − | 647012889 |
| 25 | 66823 | 67548 | + | 647012859 |
| 26 | 183381 | 184292 | + | 647012817 |
| 27 | 12440 | 13084 | − | 647012890 |
| 28 | 1101888 | 1102271 | + | 640753091 |
| 29 | 11210 | 12427 | − | 647012890 |
| 30 | 189 | 1409 | − | 647012829 |
| 31 | 1316 | 1822 | + | 647012864 |
| 32 | 243135 | 244313 | − | 647012818 |
| 33 | 227360 | 228310 | + | 647012818 |
| 34 | 276786 | 277940 | − | 647012819 |
| 35 | 3134756 | 3135724 | − | 640753091 |
| 36 | 1599118 | 1600077 | + | 640753091 |
| 37 | 1112389 | 1113570 | − | 640753091 |
| 38 | 196893 | 197789 | − | 647012820 |
| 39 | 17332 | 17544 | − | 646206740 |
| 40 | 1005118 | 1006293 | + | 640753091 |
| 41 | 3131862 | 3132830 | − | 640753091 |
| 42 | 5048349 | 5049131 | − | 640753091 |
| 43 | 927700 | 928224 | + | 647012817 |
| 44 | 395510 | 396043 | + | 647012820 |
| 45 | 616091 | 617041 | − | 647012818 |
| 46 | 42335 | 42577 | − | 647012889 |
| 47 | 107941 | 108870 | + | 647012865 |
| 48 | 30480 | 31511 | − | 647012846 |
| 49 | 3146974 | 3147780 | − | 640753091 |
| 50 | 1003277 | 1004080 | + | 640753091 |

TABLE 20a
Data for Serratia, particularly Serratia marcescens

| | Scaffold.External. | | |
|---|---|---|---|
| No. | Accession | Scaffold.Name | best_pv |
| 1 | NC_009832 | Serratia proteamaculans 568: NC_009832 | 3.70422109249874e−06 |
| 2 | NZ_ADBY01000058 | Serratia odorifera DSM 4582 contig00061: NZ_ADBY01000058 | 6.00624466630552e−06 |
| 3 | NZ_ADBY01000056 | Serratia odorifera DSM 4582 contig00059: NZ_ADBY01000056 | 6.00624466630552e−06 |
| 4 | NZ_ADBY01000031 | Serratia odorifera DSM 4582 contig00034: NZ_ADBY01000031 | 8.61505367610747e−06 |
| 5 | NZ_GL636422 | Serratia symbiotica str. Tucson genomic scaffold contig09350: | 8.61505367610747e−06 |
| | | NZ_GL636422 | |
| 6 | NZ_ADBX01000013 | Serratia odorifera 4Rx13 SODm: NZ_ADBX01000013 | 8.61505367610747e−06 |
| 7 | NZ_ADBX01000004 | Serratia odorifera 4Rx13 SODd: NZ_ADBX01000004 | 1.33354783010227e−05 |
| 8 | NC_009832 | Serratia proteamaculans 568: NC_009832 | 1.37889112422256e−05 |
| 9 | NZ_ADBX01000010 | Serratia odorifera 4Rx13 SODj: NZ_ADBX01000010 | 1.55998636550055e−05 |
| 10 | NZ_ADBX01000013 | Serratia odorifera 4Rx13 SODm: NZ_ADBX01000013 | 1.55998636550055e−05 |
| 11 | NZ_GL636105 | Serratia symbiotica str. Tucson genomic scaffold scaffold00209: | 1.55998636550055e−05 |
| | | NZ_GL636105 | |
| 12 | NC_014837 | Pantoea sp. At-9b chromosome: NC_014837 | 1.55998636550055e−05 |
| 13 | NZ_GL636364 | Serratia symbiotica str. Tucson genomic scaffold contig09039: | 1.55998636550055e−05 |
| | | NZ_GL636364 | |
| 14 | NC_009832 | Serratia proteamaculans 568: NC_009832 | 1.55998636550055e−05 |
| 15 | NZ_ADBY01000048 | Serratia odorifera DSM 4582 contig00051: NZ_ADBY01000048 | 2.17438866604963e−05 |
| 16 | NZ_ADBX01000002 | Serratia odorifera 4Rx13 SODb: NZ_ADBX01000002 | 2.94809945975299e−05 |
| 17 | NZ_ADBY01000031 | Serratia odorifera DSM 4582 contig00034: NZ_ADBY01000031 | 3.13750499443641e−05 |
| 18 | NZ_ADBY01000045 | Serratia odorifera DSM 4582 contig00048: NZ_ADBY01000045 | 3.13750499443641e−05 |
| 19 | NZ_ADBY01000031 | Serratia odorifera DSM 4582 contig00034: NZ_ADBY01000031 | 3.13750499443641e−05 |
| 20 | NZ_ADBY01000058 | Serratia odorifera DSM 4582 contig00061: NZ_ADBY01000058 | 3.13750499443641e−05 |
| 21 | NZ_ADBX01000002 | Serratia odorifera 4Rx13 SODb: NZ_ADBX01000002 | 3.43966250408489e−05 |
| 22 | NZ_ADBY01000050 | Serratia odorifera DSM 4582 contig00053: NZ_ADBY01000050 | 3.66332257629745e−05 |
| 23 | NZ_ADBY01000013 | Serratia odorifera DSM 4582 contig00016: NZ_ADBY01000013 | 3.7147650177074e−05 |
| 24 | NZ_ADBY01000056 | Serratia odorifera DSM 4582 contig00059: NZ_ADBY01000056 | 3.7147650177074e−05 |
| 25 | NZ_ADBY01000026 | Serratia odorifera DSM 4582 contig00029: NZ_ADBY01000026 | 3.7147650177074e−05 |
| 26 | NZ_ADBX01000001 | Serratia odorifera 4Rx13 SODa: NZ_ADBX01000001 | 3.77977323028027e−05 |
| 27 | NC_009832 | Serratia proteamaculans 568: NC_009832 | 4.06693999812307e−05 |
| 28 | NZ_ADBY01000031 | Serratia odorifera DSM 4582 contig00034: NZ_ADBY01000031 | 4.20000578456372e−05 |
| 29 | NZ_ADBX01000002 | Serratia odorifera 4Rx13 SODb: NZ_ADBX01000002 | 5.02288669357547e−05 |
| 30 | NZ_ADBX01000002 | Serratia odorifera 4Rx13 SODb: NZ_ADBX01000002 | 5.02288669357547e−05 |
| 31 | NZ_ADBX01000003 | Serratia odorifera 4Rx13 SODc: NZ_ADBX01000003 | 5.02288669357547e−05 |
| 32 | NC_009832 | Serratia proteamaculans 568: NC_009832 | 5.02288669357547e−05 |
| 33 | NC_009832 | Serratia proteamaculans 568: NC_009832 | 5.02288669357547e−05 |
| 34 | NC_009832 | Serratia proteamaculans 568: NC_009832 | 5.02288669357547e−05 |
| 35 | NZ_ADBX01000004 | Serratia odorifera 4Rx13 SODd: NZ_ADBX01000004 | 5.02288669357547e−05 |
| 36 | NZ_GG657374 | Citrobacter sp. 30_2 genomic scaffold supercont1.9: NZ_GG657374 | 5.02288669357547e−05 |
| 37 | NC_009832 | Serratia proteamaculans 568: NC_009832 | 5.02288669357547e−05 |
| 38 | NC_009832 | Serratia proteamaculans 568: NC_009832 | 5.02288669357547e−05 |
| 39 | NC_009832 | Serratia proteamaculans 568: NC_009832 | 5.02288669357547e−05 |
| 40 | NZ_ADBX01000001 | Serratia odorifera 4Rx13 SODa: NZ_ADBX01000001 | 5.02288669357547e−05 |
| 41 | NZ_ADBX01000004 | Serratia odorifera 4Rx13 SODd: NZ_ADBX01000004 | 5.02288669357547e−05 |
| 42 | NZ_ADBX01000002 | Serratia odorifera 4Rx13 SODb: NZ_ADBX01000002 | 5.02288669357547e−05 |
| 43 | NZ_ADBY01000032 | Serratia odorifera DSM 4582 contig00035: NZ_ADBY01000032 | 5.02288669357547e−05 |
| 44 | NZ_ADBY01000013 | Serratia odorifera DSM 4582 contig00016: NZ_ADBY01000013 | 5.88044402302405e−05 |
| 45 | NC_009832 | Serratia proteamaculans 568: NC_009832 | 6.62251962114689e−05 |
| 46 | NC_009832 | Serratia proteamaculans 568: NC_009832 | 7.15986854143193e−05 |
| 47 | NZ_ADBX01000002 | Serratia odorifera 4Rx13 SODb: NZ_ADBX01000002 | 7.1811098690049e−05 |
| 48 | NC_009832 | Serratia proteamaculans 568: NC_009832 | 7.1811098690049e−05 |
| 49 | NC_009832 | Serratia proteamaculans 568: NC_009832 | 7.1811098690049e−05 |
| 50 | NZ_ADBY01000036 | Serratia odorifera DSM 4582 contig00039: NZ_ADBY01000036 | 7.1811098690049e−05 |

TABLE 20b
Data for Serratia, particularly Serratia marcescens (continued)

| No. | sign_phenos | sign_phenos_class | best_pheno | best_pheno_class |
|---|---|---|---|---|
| 1 | AZT; CAX; CAZ; CFT; CP; GM; LVX; P/T; TO; T/S | aminoglycoside; fluoroquinolone; lactam; other | LVX | fluoroquinolone |
| 2 | CP; LVX; T/S | fluoroquinolone; other | CP | fluoroquinolone |
| 3 | AZT; CAX; CP; LVX; T/S | fluoroquinolone; lactam; other | LVX | fluoroquinolone |
| 4 | AZT; CAX; CFT; CP; LVX; P/T; T/S | fluoroquinolone; lactam; other | LVX | fluoroquinolone |
| 5 | CAX; CAZ; CFT; CP; LVX; P/T | fluoroquinolone; lactam | CP | fluoroquinolone |
| 6 | AZT; CAX; CAZ; CFT; CP; LVX; P/T | fluoroquinolone; lactam | CP | fluoroquinolone |
| 7 | CAX; CFT; CP; LVX | fluoroquinolone; lactam | LVX | fluoroquinolone |
| 8 | CAX; CFT; CP; LVX; T/S | fluoroquinolone; lactam; other | LVX | fluoroquinolone |
| 9 | CAX; CFT; CP; LVX; TO | aminoglycoside; fluoroquinolone; lactam | LVX | fluoroquinolone |
| 10 | AZT; CAX; CAZ; CFT; CP; LVX; P/T | fluoroquinolone; lactam | CP | fluoroquinolone |
| 11 | AZT; CAX; CAZ; CFT; CP; P/T | fluoroquinolone; lactam | CAX | lactam |
| 12 | CAX; CFT; CP; GM; LVX; P/T; TO; T/S | aminoglycoside; fluoroquinolone; lactam; other | LVX | fluoroquinolone |
| 13 | AZT; CAX; CAZ; CFT; CP; P/T | fluoroquinolone; lactam | CAX | lactam |
| 14 | CP; LVX | fluoroquinolone | LVX | fluoroquinolone |
| 15 | AZT; CAX; CFT; CP; GM; LVX; P/T; TO; T/S | aminoglycoside; fluoroquinolone; lactam; other | LVX | fluoroquinolone |
| 16 | AZT; CAX; CFT; CP; GM; LVX; P/T; TO; T/S | aminoglycoside; fluoroquinolone; lactam; other | LVX | fluoroquinolone |
| 17 | AZT; CAX; CFT; CP; LVX; P/T; T/S | fluoroquinolone; lactam; other | LVX | fluoroquinolone |
| 18 | CAX; CFT; CP; GM; LVX; P/T; TO; T/S | aminoglycoside; fluoroquinolone; lactam; other | LVX | fluoroquinolone |
| 19 | AZT; CAX; CFT; CP; LVX; P/T; T/S | fluoroquinolone; lactam; other | LVX | fluoroquinolone |
| 20 | AZT; CAX; CFT; CP; GM; LVX; P/T; TO; T/S | aminoglycoside; fluoroquinolone; lactam; other | LVX | fluoroquinolone |
| 21 | CAX; CP; LVX; T/S | fluoroquinolone; lactam; other | LVX | fluoroquinolone |
| 22 | AZT; CAX; CFT; CP; GM; LVX; P/T; TO; T/S | aminoglycoside; fluoroquinolone; lactam; other | LVX | fluoroquinolone |
| 23 | CAX; CFT; CP; GM; LVX; P/T; TO; T/S | aminoglycoside; fluoroquinolone; lactam; other | CP | fluoroquinolone |
| 24 | AZT; CAX; CAZ; CFT; P/T | lactam | CAZ | lactam |
| 25 | CAX; CFT; CP; GM; LVX; P/T | aminoglycoside; fluoroquinolone; lactam | LVX | fluoroquinolone |
| 26 | AZT; CAX; CFT; CP; GM; LVX; P/T; TO; T/S | aminoglycoside; fluoroquinolone; lactam; other | LVX | fluoroquinolone |
| 27 | CAX; CP; LVX | fluoroquinolone; lactam | LVX | fluoroquinolone |
| 28 | CAX; CFT; CP; LVX; P/T; T/S | fluoroquinolone; lactam; other | P/T | lactam |
| 29 | AZT; CAX; CFT; CP; GM; LVX; P/T; TO; T/S | aminoglycoside; fluoroquinolone; lactam; other | LVX | fluoroquinolone |
| 30 | CAX; CFT; CP; LVX; T/S | fluoroquinolone; lactam; other | LVX | fluoroquinolone |
| 31 | CAX; CFT; CP; LVX; T/S | fluoroquinolone; lactam; other | LVX | fluoroquinolone |
| 32 | AZT; CAX; CFT; CP; GM; LVX; P/T; TO; T/S | aminoglycoside; fluoroquinolone; lactam; other | LVX | fluoroquinolone |
| 33 | AZT; CAX; CFT; CP; LVX; T/S | fluoroquinolone; lactam; other | CP | fluoroquinolone |
| 34 | AZT; CAX; CFT; CP; GM; LVX; P/T; TO; T/S | aminoglycoside; fluoroquinolone; lactam; other | LVX | fluoroquinolone |
| 35 | CAX; CFT; CP; LVX; P/T; T/S | fluoroquinolone; lactam; other | LVX | fluoroquinolone |
| 36 | CP; GM; LVX; TO; T/S | aminoglycoside; fluoroquinolone; other | LVX | fluoroquinolone |
| 37 | CAX; CFT; CP; LVX; P/T; T/S | fluoroquinolone; lactam; other | LVX | fluoroquinolone |
| 38 | AZT; CAX; CFT; CP; GM; LVX; P/T; TO; T/S | aminoglycoside; fluoroquinolone; lactam; other | LVX | fluoroquinolone |
| 39 | AZT; CAX; CFT; CP; GM; LVX; P/T; TO; T/S | aminoglycoside; fluoroquinolone; lactam; other | LVX | fluoroquinolone |
| 40 | CP; LVX; P/T | fluoroquinolone; lactam | LVX | fluoroquinolone |
| 41 | CAX; CFT; CP; LVX; T/S | fluoroquinolone; lactam; other | LVX | fluoroquinolone |
| 42 | AZT; CAX; CFT; CP; GM; LVX; P/T; TO; T/S | aminoglycoside; fluoroquinolone; lactam; other | LVX | fluoroquinolone |
| 43 | AZT; CAX; CFT; CP; GM; LVX; TO; T/S | aminoglycoside; fluoroquinolone; lactam; other | LVX | fluoroquinolone |
| 44 | CAX; CFT; CP; LVX; P/T | fluoroquinolone; lactam | LVX | fluoroquinolone |
| 45 | CAX; CFT; CP; LVX | fluoroquinolone; lactam | LVX | fluoroquinolone |
| 46 | AZT; CAX; CFT; CP; GM; LVX; P/T; TO; T/S | aminoglycoside; fluoroquinolone; lactam; other | LVX | fluoroquinolone |
| 47 | AZT; CAX; CFT; CP; LVX; P/T; TO | aminoglycoside; fluoroquinolone; lactam | CP | fluoroquinolone |
| 48 | CAX; CFT; CP; LVX; T/S | fluoroquinolone; lactam; other | LVX | fluoroquinolone |
| 49 | CFT; CP; LVX | fluoroquinolone; lactam | LVX | fluoroquinolone |
| 50 | AZT; CAX; CFT; CP; GM; LVX; P/T | aminoglycoside; fluoroquinolone; lactam | CAX | lactam |

TABLE 20c
Data for Serratia, particularly Serratia marcescens (continued)

| No. | num_aminoglycoside | num_fluoroquinolone | num_lactam | num_other |
|---|---|---|---|---|
| 1 | 2 | 2 | 5 | 1 |
| 2 | 0 | 2 | 0 | 1 |
| 3 | 0 | 2 | 2 | 1 |
| 4 | 0 | 2 | 4 | 1 |
| 5 | 0 | 2 | 4 | 0 |
| 6 | 0 | 2 | 5 | 0 |
| 7 | 0 | 2 | 2 | 0 |
| 8 | 0 | 2 | 2 | 1 |
| 9 | 1 | 2 | 2 | 0 |
| 10 | 0 | 2 | 5 | 0 |
| 11 | 0 | 1 | 5 | 0 |
| 12 | 2 | 2 | 3 | 1 |
| 13 | 0 | 1 | 5 | 0 |
| 14 | 0 | 2 | 0 | 0 |
| 15 | 2 | 2 | 4 | 1 |
| 16 | 2 | 2 | 4 | 1 |
| 17 | 0 | 2 | 4 | 1 |
| 18 | 2 | 2 | 3 | 1 |
| 19 | 0 | 2 | 4 | 1 |
| 20 | 2 | 2 | 4 | 1 |
| 21 | 0 | 2 | 1 | 1 |
| 22 | 2 | 2 | 4 | 1 |
| 23 | 2 | 2 | 3 | 1 |
| 24 | 0 | 0 | 5 | 0 |
| 25 | 1 | 2 | 3 | 0 |
| 26 | 2 | 2 | 4 | 1 |
| 27 | 0 | 2 | 1 | 0 |
| 28 | 0 | 2 | 3 | 1 |
| 29 | 2 | 2 | 4 | 1 |
| 30 | 0 | 2 | 2 | 1 |
| 31 | 0 | 2 | 2 | 1 |
| 32 | 2 | 2 | 4 | 1 |
| 33 | 0 | 2 | 3 | 1 |
| 34 | 2 | 2 | 4 | 1 |
| 35 | 0 | 2 | 3 | 1 |
| 36 | 2 | 2 | 0 | 1 |
| 37 | 0 | 2 | 3 | 1 |
| 38 | 2 | 2 | 4 | 1 |
| 39 | 2 | 2 | 4 | 1 |
| 40 | 0 | 2 | 1 | 0 |
| 41 | 0 | 2 | 2 | 1 |
| 42 | 2 | 2 | 4 | 1 |
| 43 | 2 | 2 | 3 | 1 |
| 44 | 0 | 2 | 3 | 0 |
| 45 | 0 | 2 | 2 | 0 |
| 46 | 2 | 2 | 4 | 1 |
| 47 | 1 | 2 | 4 | 0 |
| 48 | 0 | 2 | 2 | 1 |
| 49 | 0 | 2 | 1 | 0 |
| 50 | 1 | 2 | 4 | 0 |

TABLE 20d
Data for Serratia, particularly Serratia marcescens (continued)

| No. | AZT_pv_adj | CAX_pv_adj | CAZ_pv_adj | CFT_pv_adj | CP_pv_adj |
|---|---|---|---|---|---|
| 1 | 4.82E−04 | 5.24E−04 | 6.41E−03 | 7.29E−04 | 2.27E−05 |
| 2 | 1.58E−01 | 1.39E−01 | 2.26E−01 | 3.68E−02 | 6.01E−06 |
| 3 | 6.77E−04 | 8.30E−03 | 2.51E−02 | 1.65E−02 | 2.17E−05 |
| 4 | 8.92E−03 | 3.01E−03 | 3.16E−01 | 7.90E−03 | 2.95E−05 |
| 5 | 1.60E−02 | 4.77E−04 | 5.25E−03 | 1.36E−04 | 8.62E−06 |
| 6 | 1.22E−03 | 1.22E−03 | 1.24E−03 | 4.08E−04 | 8.62E−06 |
| 7 | 3.82E−02 | 3.55E−03 | 4.51E−02 | 2.17E−03 | 7.86E−05 |
| 8 | 1.48E−01 | 5.09E−03 | 6.93E−02 | 4.93E−03 | 1.10E−04 |
| 9 | 4.53E−02 | 5.02E−03 | 3.12E−01 | 2.64E−03 | 5.13E−04 |
| 10 | 6.43E−04 | 1.61E−04 | 7.67E−04 | 8.45E−05 | 1.56E−05 |
| 11 | 3.67E−05 | 1.56E−05 | 1.56E−05 | 5.02E−05 | 6.54E−03 |
| 12 | 1.44E−02 | 6.36E−03 | 4.83E−02 | 3.41E−03 | 2.36E−04 |
| 13 | 3.67E−05 | 1.56E−05 | 1.56E−05 | 5.02E−05 | 6.54E−03 |
| 14 | 4.07E−01 | 5.36E−02 | 7.62E−01 | 4.93E−02 | 5.86E−04 |
| 15 | 1.11E−03 | 7.67E−04 | 4.28E−02 | 1.04E−03 | 4.94E−05 |
| 16 | 6.43E−04 | 1.24E−03 | 2.38E−02 | 2.68E−03 | 1.82E−04 |
| 17 | 4.26E−03 | 1.84E−03 | 6.64E−02 | 4.93E−03 | 1.22E−04 |
| 18 | 1.73E−02 | 1.76E−04 | 2.04E−02 | 5.24E−04 | 6.30E−04 |
| 19 | 4.26E−03 | 1.84E−03 | 6.64E−02 | 4.93E−03 | 1.22E−04 |
| 20 | 9.20E−04 | 1.82E−04 | 2.34E−02 | 1.48E−04 | 1.69E−04 |
| 21 | 2.19E−02 | 6.70E−03 | 1 | 2.46E−02 | 7.82E−04 |
| 22 | 1.55E−03 | 4.30E−04 | 6.08E−02 | 5.90E−04 | 1.52E−04 |
| 23 | 4.85E−02 | 7.20E−04 | 1.01E−01 | 6.90E−04 | 3.71E−05 |
| 24 | 2.28E−03 | 2.41E−03 | 3.71E−05 | 4.23E−03 | 1.66E−01 |
| 25 | 1.01E−02 | 3.27E−04 | 5.44E−02 | 4.95E−04 | 7.62E−04 |
| 26 | 8.18E−04 | 3.20E−04 | 4.45E−02 | 3.27E−04 | 1.53E−04 |
| 27 | 2.82E−02 | 6.08E−03 | 2.88E−01 | 4.51E−02 | 1.10E−04 |
| 28 | 5.92E−02 | 3.15E−04 | 6.50E−01 | 1.11E−03 | 6.89E−03 |
| 29 | 1.66E−03 | 6.30E−04 | 8.28E−02 | 6.43E−04 | 3.33E−04 |
| 30 | 5.14E−02 | 1.60E−03 | 5.77E−02 | 2.64E−03 | 1.17E−03 |
| 31 | 5.14E−02 | 1.60E−03 | 5.77E−02 | 2.64E−03 | 1.17E−03 |
| 32 | 1.17E−03 | 3.15E−04 | 5.90E−02 | 3.27E−04 | 3.15E−04 |
| 33 | 1.07E−03 | 3.99E−03 | 2.05E−02 | 2.84E−03 | 5.02E−05 |
| 34 | 1.16E−03 | 5.89E−04 | 5.88E−02 | 6.07E−04 | 2.32E−04 |
| 35 | 4.11E−02 | 1.55E−03 | 5.76E−02 | 2.12E−03 | 1.15E−03 |
| 36 | 2.08E−02 | 2.04E−02 | 2.72E−01 | 3.09E−02 | 3.33E−04 |
| 37 | 5.14E−02 | 1.13E−03 | 5.80E−02 | 1.53E−03 | 1.50E−03 |
| 38 | 1.17E−03 | 3.15E−04 | 5.90E−02 | 3.27E−04 | 3.15E−04 |
| 39 | 4.30E−03 | 1.43E−03 | 1.74E−01 | 2.47E−03 | 9.38E−04 |
| 40 | 8.63E−02 | 1.24E−02 | 2.31E−01 | 1.12E−02 | 7.34E−04 |
| 41 | 5.14E−02 | 2.07E−03 | 5.80E−02 | 2.73E−03 | 1.50E−03 |
| 42 | 1.17E−03 | 3.15E−04 | 5.90E−02 | 3.27E−04 | 3.15E−04 |
| 43 | 7.04E−03 | 6.21E−03 | 3.82E−02 | 3.31E−03 | 1.04E−04 |
| 44 | 3.16E−01 | 1.58E−03 | 5.58E−01 | 1.57E−03 | 7.78E−04 |
| 45 | 2.46E−02 | 8.70E−03 | 2.31E−01 | 5.07E−03 | 1.80E−03 |
| 46 | 1.55E−03 | 7.82E−04 | 5.97E−02 | 8.10E−04 | 3.15E−04 |
| 47 | 2.96E−04 | 2.61E−03 | 5.49E−02 | 3.46E−03 | 7.18E−05 |
| 48 | 5.20E−02 | 2.61E−03 | 5.87E−02 | 3.46E−03 | 1.53E−03 |
| 49 | 2.15E−01 | 1.36E−02 | 2.60E−01 | 9.12E−03 | 1.92E−04 |
| 50 | 2.93E−03 | 7.18E−05 | 2.88E−02 | 7.18E−05 | 1.15E−03 |

TABLE 20e
Data for Serratia, particularly Serratia marcescens (continued)

| No. | GM_pv_adj | LVX_pv_adj | P/T_pv_adj | TO_pv_adj | T/S_pv_adj |
|---|---|---|---|---|---|
| 1 | 7.29E−04 | 3.70E−06 | 4.19E−03 | 5.65E−04 | 2.79E−04 |
| 2 | 3.92E−02 | 8.62E−06 | 5.32E−01 | 5.08E−02 | 9.68E−03 |
| 3 | 3.60E−02 | 6.01E−06 | 4.96E−02 | 9.86E−02 | 1.55E−03 |
| 4 | 2.38E−01 | 8.62E−06 | 4.51E−04 | 1.33E−01 | 5.10E−03 |
| 5 | 2.87E−01 | 4.05E−04 | 5.63E−05 | 3.66E−02 | 2.11E−02 |
| 6 | 9.01E−01 | 8.10E−04 | 6.41E−03 | 4.07E−02 | 1.63E−01 |
| 7 | 3.66E−02 | 1.33E−05 | 1.49E−02 | 1.15E−02 | 2.81E−02 |
| 8 | 1.16E−01 | 1.38E−05 | 1.31E−02 | 6.43E−02 | 5.52E−03 |
| 9 | 1.25E−02 | 1.56E−05 | 5.88E−02 | 1.37E−03 | 3.00E−02 |
| 10 | 2.58E−01 | 1.22E−04 | 9.05E−05 | 4.31E−02 | 3.97E−02 |
| 11 | 2.06E−01 | 3.60E−01 | 3.67E−05 | 1.87E−01 | 3.72E−01 |
| 12 | 5.33E−03 | 1.56E−05 | 6.87E−03 | 3.46E−03 | 8.20E−03 |
| 13 | 2.06E−01 | 3.60E−01 | 3.67E−05 | 1.87E−01 | 3.72E−01 |
| 14 | 4.95E−02 | 1.56E−05 | 1.34E−01 | 1.43E−01 | 2.07E−02 |
| 15 | 2.56E−03 | 2.17E−05 | 2.35E−03 | 3.96E−03 | 4.94E−04 |
| 16 | 3.89E−04 | 2.95E−05 | 1.52E−03 | 3.51E−03 | 2.43E−03 |
| 17 | 1.48E−01 | 3.14E−05 | 2.32E−04 | 8.78E−02 | 5.89E−04 |
| 18 | 3.24E−03 | 3.14E−05 | 2.41E−03 | 4.32E−03 | 4.63E−03 |
| 19 | 1.48E−01 | 3.14E−05 | 2.32E−04 | 8.78E−02 | 5.89E−04 |
| 20 | 2.78E−03 | 3.14E−05 | 1.10E−03 | 2.42E−03 | 6.75E−04 |
| 21 | 2.77E−02 | 3.44E−05 | 5.49E−02 | 1.12E−01 | 1.40E−03 |
| 22 | 5.63E−03 | 3.66E−05 | 3.16E−03 | 5.49E−03 | 3.24E−03 |
| 23 | 3.72E−03 | 4.07E−05 | 1.76E−03 | 4.82E−03 | 3.60E−03 |
| 24 | 2.22E−01 | 1 | 9.74E−03 | 1.18E−01 | 2.81E−01 |
| 25 | 4.82E−03 | 3.71E−05 | 7.82E−04 | 2.06E−02 | 1.08E−02 |
| 26 | 1.24E−03 | 3.78E−05 | 1.36E−03 | 2.34E−03 | 1.55E−03 |
| 27 | 5.36E−02 | 4.07E−05 | 4.63E−02 | 3.92E−02 | 1.38E−02 |
| 28 | 1.41E−01 | 7.82E−04 | 4.20E−05 | 3.04E−02 | 5.10E−03 |
| 29 | 2.77E−03 | 5.02E−05 | 1.37E−03 | 5.69E−03 | 2.21E−03 |
| 30 | 1.47E−02 | 5.02E−05 | 1.03E−02 | 3.27E−02 | 6.75E−03 |
| 31 | 1.47E−02 | 5.02E−05 | 1.03E−02 | 3.27E−02 | 6.75E−03 |
| 32 | 1.76E−03 | 5.02E−05 | 1.07E−03 | 4.09E−03 | 2.26E−03 |
| 33 | 2.27E−02 | 3.89E−04 | 4.16E−02 | 1.11E−02 | 6.71E−03 |
| 34 | 1.76E−03 | 5.02E−05 | 1.80E−03 | 3.17E−03 | 2.24E−03 |
| 35 | 1.48E−02 | 5.02E−05 | 8.05E−03 | 2.57E−02 | 6.70E−03 |
| 36 | 2.77E−03 | 5.02E−05 | 1.42E−02 | 2.41E−03 | 2.10E−04 |
| 37 | 1.48E−02 | 5.02E−05 | 5.52E−03 | 3.27E−02 | 6.89E−03 |
| 38 | 1.76E−03 | 5.02E−05 | 1.07E−03 | 4.09E−03 | 2.26E−03 |
| 39 | 1.31E−03 | 5.02E−05 | 5.93E−03 | 3.06E−03 | 2.21E−03 |
| 40 | 3.13E−02 | 5.02E−05 | 5.52E−03 | 1.02E−02 | 9.79E−02 |
| 41 | 1.48E−02 | 5.02E−05 | 1.06E−02 | 3.27E−02 | 6.89E−03 |
| 42 | 1.76E−03 | 5.02E−05 | 1.07E−03 | 4.09E−03 | 2.26E−03 |
| 43 | 9.28E−04 | 5.02E−05 | 6.47E−02 | 2.47E−03 | 1.76E−03 |
| 44 | 1.83E−02 | 5.88E−05 | 1.62E−03 | 1.34E−02 | 1.37E−02 |
| 45 | 9.13E−01 | 6.62E−05 | 6.12E−02 | 1.22E−01 | 1.54E−01 |
| 46 | 1.80E−03 | 7.16E−05 | 2.42E−03 | 4.20E−03 | 2.34E−03 |
| 47 | 4.20E−02 | 8.45E−05 | 9.22E−03 | 6.72E−03 | 1.09E−02 |
| 48 | 1.50E−02 | 7.18E−05 | 1.34E−02 | 4.14E−02 | 9.77E−03 |
| 49 | 4.30E−02 | 7.18E−05 | 3.73E−02 | 2.25E−02 | 1.57E−02 |
| 50 | 4.68E−03 | 1.51E−04 | 1.15E−03 | 2.57E−02 | 1.67E−02 |

TABLE 20f
Data for Serratia, particularly Serratia marcescens (continued)

| | | | | |
|---|---|---|---|---|
| | | Gene. | GenBank. | |
| No. | Locus.Tag | Symbol | Accession | Chromosome |

| | | | |
|---|---|---|---|
| 1 | Spro_0657 | | YP_001476891 |
| 2 | HMPREF0758_4528 | | ZP_06641192 |
| 3 | HMPREF0758_4282 | wrbA | ZP_06640946 |
| 4 | HMPREF0758_1761 | | ZP_06638425 |
| 5 | SSYM_0272 | | ZP_08040542 |
| 6 | SOD_m00050 | | ZP_06193534 |
| 7 | SOD_d02380 | | ZP_06191491 |
| 8 | Spro_3910 | | YP_001480133 |
| 9 | SOD_j00160 | | ZP_06193066 |
| 10 | SOD_m00140 | | ZP_06193543 |
| 11 | SSYM_0779 | | ZP_08038782 |
| 12 | Pat9b_2844 | | YP_004116700 |
| 13 | SSYM_0215 | | ZP_08040491 |
| 14 | Spro_1286 | | YP_001477518 |
| 15 | HMPREF0758_3087 | paaY | ZP_06639751 |
| 16 | SOD_b04490 | | ZP_06190513 |
| 17 | HMPREF0758_1765 | | ZP_06638429 |
| 18 | HMPREF0758_2630 | deoR | ZP_06639294 |
| 19 | HMPREF0758_1762 | vtaK | ZP_06638426 |
| 20 | HMPREF0758_4768 | yedI | ZP_06641432 |
| 21 | SOD_b01290 | | ZP_06190194 |
| 22 | HMPREF0758_3449 | mdtJ | ZP_06640113 |
| 23 | HMPREF0758_0340 | | ZP_06637004 |
| 24 | HMPREF0758_4122 | dnaC | ZP_06640786 |
| 25 | HMPREF0758_1641 | pepE | ZP_06638305 |
| 26 | SOD_a01780 | | ZP_06189226 |
| 27 | Spro_0998 | | YP_001477230 |
| 28 | HMPREF0758_1747 | | ZP_06638411 |
| 29 | SOD_b01600 | | ZP_06190225 |
| 30 | SOD_b01460 | | ZP_06190211 |
| 31 | SOD_c02470 | | ZP_06190898 |
| 32 | Spro_2856 | | YP_001479085 |
| 33 | Spro_1467 | | YP_001477699 |
| 34 | Spro_1011 | | YP_001477243 |
| 35 | SOD_d01640 | | ZP_06191418 |
| 36 | CSAG_04704 | | ZP_04558356 |
| 37 | Spro_0906 | | YP_001477140 |
| 38 | Spro_2853 | | YP_001479082 |
| 39 | Spro_4574 | | YP_001480795 |
| 40 | SOD_a08590 | | ZP_06189897 |
| 41 | SOD_d03490 | | ZP_06191602 |
| 42 | SOD_b05060 | | ZP_06190570 |
| 43 | HMPREF0758_1879 | yhcC | ZP_06638543 |
| 44 | HMPREF0758_0325 | apbE | ZP_06636989 |
| 45 | Spro_2867 | | YP_001479096 |
| 46 | Spro_0904 | | YP_001477138 |
| 47 | SOD_b01270 | | ZP_06190192 |
| 48 | Spro_4454 | | YP_001480676 |
| 49 | Spro_4262 | | YP_001480484 |
| 50 | HMPREF0758_2167 | hrpB | ZP_06638831 |

TABLE 20g
Data for Serratia, particularly Serratia marcescens (continued)

| No. | Start.Coord | End.Coord | Strand | Scaffold.ID |
|---|---|---|---|---|
| 1 | 721013 | 721786 | + | 640753091 |
| 2 | 113063 | 113683 | + | 647012891 |
| 3 | 196203 | 196802 | + | 647012889 |
| 4 | 14537 | 15286 | + | 647012864 |
| 5 | 1 | 622 | + | 651285392 |
| 6 | 5289 | 5756 | − | 647012829 |
| 7 | 276617 | 277270 | − | 647012820 |
| 8 | 4328564 | 4329223 | + | 640753091 |
| 9 | 10640 | 11029 | − | 647012826 |
| 10 | 12102 | 12680 | − | 647012829 |
| 11 | 54235 | 55095 | − | 651285075 |
| 12 | 3117915 | 3119003 | − | 649633106 |
| 13 | 1 | 203 | + | 651285334 |
| 14 | 1415512 | 1416153 | − | 640753091 |
| 15 | 166028 | 166624 | − | 647012881 |
| 16 | 563304 | 564224 | − | 647012818 |
| 17 | 17164 | 19063 | + | 647012864 |
| 18 | 1577 | 1921 | + | 647012878 |
| 19 | 15286 | 15990 | + | 647012864 |
| 20 | 357014 | 357931 | − | 647012891 |
| 21 | 207219 | 208373 | − | 647012818 |
| 22 | 144943 | 145311 | + | 647012883 |
| 23 | 46700 | 47314 | − | 647012846 |
| 24 | 40618 | 41358 | − | 647012889 |
| 25 | 66823 | 67548 | + | 647012859 |
| 26 | 183381 | 184292 | + | 647012817 |
| 27 | 1101888 | 1102271 | + | 640753091 |
| 28 | 1316 | 1822 | + | 647012864 |
| 29 | 243135 | 244313 | − | 647012818 |
| 30 | 227360 | 228310 | + | 647012818 |
| 31 | 276786 | 277940 | − | 647012819 |
| 32 | 3134756 | 3135724 | − | 640753091 |
| 33 | 1599118 | 1600077 | + | 640753091 |
| 34 | 1112389 | 1113570 | − | 640753091 |
| 35 | 196893 | 197789 | − | 647012820 |
| 36 | 17332 | 17544 | − | 646206740 |
| 37 | 1005118 | 1006293 | + | 640753091 |
| 38 | 3131862 | 3132830 | − | 640753091 |
| 39 | 5048349 | 5049131 | − | 640753091 |
| 40 | 927700 | 928224 | + | 647012817 |
| 41 | 395510 | 396043 | + | 647012820 |
| 42 | 616091 | 617041 | − | 647012818 |
| 43 | 107941 | 108870 | + | 647012865 |
| 44 | 30480 | 31511 | − | 647012846 |
| 45 | 3146974 | 3147780 | − | 640753091 |
| 46 | 1003277 | 1004080 | + | 640753091 |
| 47 | 202590 | 204044 | − | 647012818 |
| 48 | 4927194 | 4927727 | + | 640753091 |
| 49 | 4725710 | 4726606 | − | 640753091 |
| 50 | 70350 | 72779 | + | 647012869 |

### Example 11

### Shigella

[0287] The procedure was carried out as in Example 1, except that the following microorganisms were used:

[0288] Bacterial Strains

[0289] The inventors selected 442 Shigella strains, particularly Shigella boydii, Shigella dysenteriae, Shigella flexneri, Shigella sonnei and other Shigella species, from the microbiology strain collection at Siemens Healthcare Diagnostics (West Sacramento, Calif.) for susceptibility testing and whole genome sequencing.

[0290] From MetaRef, 730 centroids of Shigella species were used as reference sequences.

[0291] The results for Shigella species are shown in Tables 21 (corresponding to Table 1) and 22 (corresponding to Table 2).

TABLE 21a
Data for Shigella species

| | Scaffold.External. | | |
|---|---|---|---|
| No. | Accession | Scaffold.Name | best_pv |
| 1 | NZ_ADUB01000093 | Escherichia coli MS 175-1 E_coli175-1-1.0_Cont166.1: NZ_ADUB01000093 | 6.86676649351252e−56 |
| 2 | NZ_ADUD01000475 | Escherichia coli MS 196-1 E_coli196-1-1.0_Cont1343.1: NZ_ADUD01000475 | 4.14817893591733e−46 |
| 3 | N Z_ADWT01000006 | Escherichia coli MS 124-1 E_coliMS124-1-1.0.1_Cont5.1: NZ_ADWT01000006 | 4.14817893591733e−46 |
| 4 | AP011957 | Salmonella enterica subsp. enterica serovar Typhimurium str. T000240 | 1.24332752332433e−44 |
| | | DNA: AP011957 | |
| 5 | CP001383 | Shigella flexneri 2002017: CP001383 | 5.69762827081762e−37 |
| 6 | NZ_AAMJ01000001 | Shigella dysenteriae 1012, unfinished sequence: NZ_AAMJ01000001 | 3.04086824044829e−34 |
| 7 | NZ_ADUB01000227 | Escherichia coli MS 175-1 E_coli175-1-1.0_Cont422.2: NZ_ADUB01000227 | 3.04086824044829e−34 |
| 8 | NZ_AAMJ01000001 | Shigella dysenteriae 1012, unfinished sequence: NZ_AAMJ01000001 | 5.67507153238613e−34 |
| 9 | CP001383 | Shigella flexneri 2002017: CP001383 | 1.46728061376833e−26 |
| 10 | NZ_ADUB01000365 | Escherichia coli MS 175-1 E_coli175-1-1.0_Cont823.2: NZ_ADUB01000365 | 4.97695865217724e−26 |
| 11 | NZ_ADUB01000054 | Escherichia coli MS 175-1 E_coli175-1-1.0_Cont100.1: NZ_ADUB01000054 | 1.31351033204593e−24 |
| 12 | CP001383 | Shigella flexneri 2002017: CP001383 | 1.66700615646725e−24 |
| 13 | NC_013509 | Edwardsiella tarda EIB202 plasmid pEIB202: NC_013509 | 3.081692811393e−24 |
| 14 | NZ_ABKX01000001 | Escherichia albertii TW07627, unfinished sequence: NZ_ABKX01000001 | 3.45432516278107e−24 |
| 15 | NC_007384 | Shigella sonnei Ss046: NC_007384 | 4.84345172785563e−23 |
| 16 | CP001383 | Shigella flexneri 2002017: CP001383 | 1.59570448713613e−17 |
| 17 | NZ_ADUT01000002 | Shigella dysenteriae 1617 gss1617.assembly.11: NZ_ADUT01000002 | 4.66906657298136e−17 |
| 18 | NZ_ABKX01000001 | Escherichia albertii TW07627, unfinished sequence: NZ_ABKX01000001 | 5.88113462200155e−17 |
| 19 | NZ_ADTR01000390 | Escherichia coli MS 21-1 E_coli21-1-1.0_Cont744.1: NZ_ADTR01000390 | 7.05214682414966e−16 |
| 20 | NZ_ADUT01000002 | Shigella dysenteriae 1617 gss1617.assembly.11: NZ_ADUT01000002 | 3.49647006284355e−15 |
| 21 | NC_006856 | Salmonella enterica subsp. enterica serovar Choleraesuis str. SC-B67 | 3.88428414470937e−13 |
| | | plasmid pSC138: NC_006856 | |
| 22 | NC_011743 | Escherichia fergusonii ATCC 35469 plasmid pEFER: NC_011743 | 6.18164438611072e−13 |
| 23 | NZ_ADUT01000048 | Shigella dysenteriae 1617 gss1617.assembly.53: NZ_ADUT01000048 | 6.40162543140323e−12 |
| 24 | NZ_ADUT01000002 | Shigella dysenteriae 1617 gss1617.assembly.11: NZ_ADUT01000002 | 1.53869362793954e−11 |
| 25 | NC_011745 | Escherichia coli ED1a: NC_011745 | 2.16302499579491e−11 |
| 26 | NZ_ADUT01000002 | Shigella dysenteriae 1617 gss1617.assembly.11: NZ_ADUT01000002 | 2.30761086733495e−11 |
| 27 | NZ_ABKY02000005 | Escherichia coli O157:H7 str. TW14588, unfinished sequence: | 4.43701528503845e−11 |
| | | NZ_ABKY02000005 | |
| 28 | NZ_ADUT01000002 | Shigella dysenteriae 1617 gss1617.assembly.11: NZ_ADUT01000002 | 8.04473895167901e−11 |
| 29 | CP002729 | Escherichia coli UMNK88: CP002729 | 1.42165494676851e−10 |
| 30 | NC_011742 | Escherichia coli S88: NC_011742 | 2.05879614239143e−10 |
| 31 | NZ_ABAK01000021 | Salmonella enterica subsp. enterica serovar Kentucky str. CVM29188, | 2.13757750700881e−10 |
| | | unfinished sequence: NZ_ABAK01000021 | |
| 32 | NC_013509 | Edwardsiella tarda EIB202 plasmid pEIB202: NC_013509 | 4.04449595701974e−10 |
| 33 | NZ_ABHS01000025 | Escherichia coli O157:H7 str. EC4486, unfinished sequence: | 4.85503165975477e−10 |
| | | NZ_ABHS01000025 | |
| 34 | NC_012759 | Escherichia coli BW2952: NC_012759 | 4.85503165975477e−10 |
| 35 | NZ_ADUD01000718 | Escherichia coli MS 196-1 E_coli196-1-1.0_Cont2124.2: NZ_ADUD01000718 | 5.8673304681529e−10 |
| 36 | NC_002655 | Escherichia coli O157:H7 EDL933: NC_002655 | 7.67538561798816e−10 |
| 37 | CP001509 | Escherichia coli BL21(DE3): CP001509 | 8.69490265401296e−10 |
| 38 | FP929040 | Enterobacter cloacae subsp. cloacae NCTC 9394 draft genome.: FP929040 | 1.59741374269166e−09 |
| 39 | NZ_AFBO01000392 | Klebsiella sp.MS 92-3 K_spMS92-3-1.0_Cont773.2: NZ_AFBO01000392 | 1.59741374269166e−09 |
| 40 | NZ_ADTQ01000190 | Escherichia coli MS 187-1 E_coli187-1-1.0_Cont287.1: NZ_ADTQ01000190 | 1.59741374269166e−09 |
| 41 | NZ_ACZD01000015 | Klebsiella pneumoniae subsp. rhinoscleromatis ATCC 13884 contig00015: | 1.59741374269166e−09 |
| | | NZ_ACZD01000015 | |
| 42 | NC_007384 | Shigella sonnei Ss046: NC_007384 | 1.59741374269166e−09 |
| 43 | NZ_ADUT01000040 | Shigella dysenteriae 1617 gss1617.assembly.46: NZ_ADUT01000040 | 1.75588873952222e−09 |
| 44 | NZ_CAAZ01000109 | Salmonella enterica subsp. enterica serovar Typhi str. E98-3139, | 4.20666708065652e−09 |
| | | unfinished sequence: NZ_CAAZ01000109 | |
| 45 | NZ_AAMJ01000012 | Shigella dysenteriae 1012, unfinished sequence: NZ_AAMJ01000012 | 5.072437403203e−09 |
| 46 | NC_010658 | Shigella boydii CDC 3083-94: NC_010658 | 8.52438957707961e−09 |
| 47 | FN554766 | Escherichia coli 042: FN554766 | 8.7610944464379e−09 |
| 48 | NZ_ADTL01000219 | Escherichia coli MS 115-1 E_coli115-1-1.0_Cont569.1: NZ_ADTL01000219 | 8.7610944464379e−09 |
| 49 | NZ_ABJT01000012 | Escherichia coli O157:H7 str. EC4024, unfinished sequence: | 9.3358254121691e−09 |
| | | NZ_ABJT01000012 | |
| 50 | NZ_AAJV01000016 | Escherichia coli E22, unfinished sequence: NZ_AAJV01000016 | 1.17232056049228e−08 |

TABLE 21b
Data for Shigella species (continued)

| No. | sign_phenos | sign_phenos_class | best_pheno | best_pheno_class |
|---|---|---|---|---|
| 1 | AM; A/S; AUG; T/S | lactam; other | AUG | lactam |
| 2 | AM; A/S; AUG; T/S | lactam; other | AUG | lactam |
| 3 | AM; A/S; AUG; T/S | lactam; other | AUG | lactam |
| 4 | AM; A/S; AUG; T/S | lactam; other | AUG | lactam |
| 5 | AM; A/S; AUG | lactam | AUG | lactam |
| 6 | T/S | other | T/S | other |
| 7 | T/S | other | T/S | other |
| 8 | T/S | other | T/S | other |
| 9 | T/S | other | T/S | other |
| 10 | T/S | other | T/S | other |
| 11 | AM; A/S; AUG; T/S | lactam; other | AUG | lactam |
| 12 | AM; A/S; AUG; T/S | lactam; other | AUG | lactam |
| 13 | A/S; AUG; T/S | lactam; other | T/S | other |
| 14 | AM; A/S; AUG; T/S | lactam; other | AUG | lactam |
| 15 | AM; A/S; AUG; T/S | lactam; other | AUG | lactam |
| 16 | T/S | other | T/S | other |
| 17 | AM; A/S | lactam | A/S | lactam |
| 18 | AM; A/S; AUG | lactam | AUG | lactam |
| 19 | AM; A/S | lactam | A/S | lactam |
| 20 | AM; A/S | lactam | A/S | lactam |
| 21 | AM; A/S | lactam | A/S | lactam |
| 22 | T/S | other | T/S | other |
| 23 | AM; A/S; AUG | lactam | AUG | lactam |
| 24 | AM; A/S | lactam | A/S | lactam |
| 25 | AM; A/S; AUG; T/S | lactam; other | AM | lactam |
| 26 | AM; A/S | lactam | A/S | lactam |
| 27 | AM; A/S; AUG | lactam | A/S | lactam |
| 28 | AM; A/S | lactam | A/S | lactam |
| 29 | AUG | lactam | AUG | lactam |
| 30 | T/S | other | T/S | other |
| 31 | AM; A/S | lactam | A/S | lactam |
| 32 | T/S | other | T/S | other |
| 33 | AM; A/S | lactam | A/S | lactam |
| 34 | AM; A/S | lactam | AM | lactam |
| 35 | AM; A/S | lactam | A/S | lactam |
| 36 | AUG | lactam | AUG | lactam |
| 37 | AM; A/S | lactam | AM | lactam |
| 38 | AM; A/S | lactam | AM | lactam |
| 39 | AM; A/S | lactam | AM | lactam |
| 40 | AM; A/S | lactam | AM | lactam |
| 41 | AM; A/S | lactam | AM | lactam |
| 42 | AM; A/S | lactam | AM | lactam |
| 43 | AUG | lactam | AUG | lactam |
| 44 | AUG | lactam | AUG | lactam |
| 45 | AUG | lactam | AUG | lactam |
| 46 | AUG | lactam | AUG | lactam |
| 47 | AUG | lactam | AUG | lactam |
| 48 | AUG | lactam | AUG | lactam |
| 49 | AM; A/S | lactam | AM | lactam |
| 50 | AM; A/S; T/S | lactam; other | AM | lactam |

TABLE 21c
Data for Shigella species (continued)

| No. | num_lactam | num_other | AM_pv_adj | A/S_pv_adj | AUG_pv_adj | T/S_pv_adj |
|---|---|---|---|---|---|---|
| 1 | 3 | 1 | 2.50E−24 | 2.78E−27 | 6.87E−56 | 6.43E−03 |
| 2 | 3 | 1 | 3.96E−18 | 5.18E−21 | 4.15E−46 | 3.89E−03 |
| 3 | 3 | 1 | 1.61E−18 | 1.80E−21 | 4.15E−46 | 2.75E−03 |
| 4 | 3 | 1 | 1.48E−18 | 1.80E−21 | 1.24E−44 | 5.45E−03 |
| 5 | 3 | 0 | 6.38E−20 | 1.76E−12 | 5.70E−37 | 1.36E−02 |
| 6 | 0 | 1 | 4.19E−01 | 7.59E−01 | 1.18E−01 | 3.04E−34 |
| 7 | 0 | 1 | 4.19E−01 | 7.59E−01 | 1.18E−01 | 3.04E−34 |
| 8 | 0 | 1 | 4.14E−01 | 6.88E−01 | 1.42E−01 | 5.68E−34 |
| 9 | 0 | 1 | 5.86E−01 | 9.62E−01 | 1.89E−01 | 1.47E−26 |
| 10 | 0 | 1 | 6.64E−01 | 8.98E−01 | 3.47E−01 | 4.98E−26 |
| 11 | 3 | 1 | 1.30E−12 | 6.35E−09 | 1.31E−24 | 1.10E−04 |
| 12 | 3 | 1 | 8.43E−13 | 4.07E−09 | 1.67E−24 | 3.04E−05 |
| 13 | 2 | 1 | 5.59E−02 | 5.39E−03 | 8.83E−03 | 3.08E−24 |
| 14 | 3 | 1 | 6.77E−13 | 3.67E−09 | 3.45E−24 | 4.57E−05 |
| 15 | 3 | 1 | 1.11E−11 | 1.11E−08 | 4.84E−23 | 3.29E−12 |
| 16 | 0 | 1 | 7.13E−01 | 9.56E−01 | 8.48E−02 | 1.60E−17 |
| 17 | 2 | 0 | 1.56E−14 | 4.67E−17 | 6.49E−01 | 1.06E−01 |
| 18 | 3 | 0 | 7.73E−05 | 2.34E−06 | 5.88E−17 | 9.61E−01 |
| 19 | 2 | 0 | 5.63E−14 | 7.05E−16 | 9.63E−01 | 3.40E−02 |
| 20 | 2 | 0 | 4.77E−14 | 3.50E−15 | 1 | 7.62E−02 |
| 21 | 2 | 0 | 3.45E−11 | 3.88E−13 | 6.47E−01 | 3.82E−02 |
| 22 | 0 | 1 | 5.80E−01 | 2.16E−01 | 2.14E−01 | 6.18E−13 |
| 23 | 3 | 0 | 5.45E−03 | 1.12E−03 | 6.40E−12 | 1.67E−01 |
| 24 | 2 | 0 | 2.67E−09 | 1.54E−11 | 4.21E−01 | 7.26E−02 |
| 25 | 3 | 1 | 2.16E−11 | 8.03E−10 | 4.80E−05 | 1.95E−03 |
| 26 | 2 | 0 | 3.72E−09 | 2.31E−11 | 5.37E−01 | 1.18E−01 |
| 27 | 3 | 0 | 2.93E−08 | 4.44E−11 | 1.86E−03 | 1.59E−01 |
| 28 | 2 | 0 | 7.34E−09 | 8.04E−11 | 6.55E−01 | 7.07E−02 |
| 29 | 1 | 0 | 2.46E−01 | 5.71E−02 | 1.42E−10 | 5.27E−01 |
| 30 | 0 | 1 | 1.01E−01 | 3.04E−02 | 5.99E−01 | 2.06E−10 |
| 31 | 2 | 0 | 7.76E−09 | 2.14E−10 | 3.71E−01 | 1.76E−01 |
| 32 | 0 | 1 | 6.37E−01 | 2.87E−01 | 2.49E−01 | 4.04E−10 |
| 33 | 2 | 0 | 5.22E−08 | 4.86E−10 | 2.71E−01 | 2.09E−01 |
| 34 | 2 | 0 | 4.86E−10 | 3.14E−08 | 5.20E−02 | 5.27E−01 |
| 35 | 2 | 0 | 1.90E−08 | 5.87E−10 | 4.20E−01 | 1.73E−01 |
| 36 | 1 | 0 | 1.02E−01 | 2.02E−02 | 7.68E−10 | 3.60E−01 |
| 37 | 2 | 0 | 8.69E−10 | 5.22E−08 | 6.38E−02 | 5.96E−01 |
| 38 | 2 | 0 | 1.60E−09 | 8.74E−08 | 6.39E−02 | 5.96E−01 |
| 39 | 2 | 0 | 1.60E−09 | 8.74E−08 | 6.39E−02 | 5.96E−01 |
| 40 | 2 | 0 | 1.60E−09 | 8.74E−08 | 6.39E−02 | 5.96E−01 |
| 41 | 2 | 0 | 1.60E−09 | 8.74E−08 | 6.39E−02 | 5.96E−01 |
| 42 | 2 | 0 | 1.60E−09 | 8.74E−08 | 6.39E−02 | 5.96E−01 |
| 43 | 1 | 0 | 4.98E−01 | 1.34E−01 | 1.76E−09 | 3.44E−01 |
| 44 | 1 | 0 | 5.00E−01 | 1.36E−01 | 4.21E−09 | 4.06E−01 |
| 45 | 1 | 0 | 3.20E−01 | 7.93E−02 | 5.07E−09 | 6.63E−01 |
| 46 | 1 | 0 | 1 | 5.81E−01 | 8.52E−09 | 4.31E−01 |
| 47 | 1 | 0 | 2.42E−01 | 8.26E−02 | 8.76E−09 | 5.20E−01 |
| 48 | 1 | 0 | 2.42E−01 | 8.26E−02 | 8.76E−09 | 5.20E−01 |
| 49 | 2 | 0 | 9.34E−09 | 1.80E−06 | 2.16E−01 | 7.92E−02 |
| 50 | 2 | 1 | 1.17E−08 | 4.60E−05 | 3.74E−02 | 7.92E−04 |

TABLE 21d
Data for Shigella species (continued)

| No. | Locus.Tag | Gene.Symbol | GenBank.Accession | Chromosome |
|---|---|---|---|---|
| 1 | HMPREF9547_01191 | | ZP_07167682 | |
| 2 | HMPREF9551_04221 | | ZP_07191576 | |
| 3 | HMPREF9347_01086 | | ZP_07208640 | |
| 4 | STMDT12_C39170 | | BAJ38860 | |
| 5 | SFxv_1168 | | ADA73425 | |
| 6 | Sdys1_01000012 | | ZP_00922750 | |
| 7 | HMPREF9547_02735 | | ZP_07169192 | |
| 8 | Sdys1_01000013 | | ZP_00922751 | |
| 9 | SFxv_4146 | | ADA76106 | |
| 10 | HMPREF9547_04432 | | ZP_07170853 | |
| 11 | HMPREF9547_00721 | | ZP_07167228 | |
| 12 | SFxv_1141 | | ADA73399 | |
| 13 | ETAE_p041 | folP | YP_003297635 | plasmid pEIB202 |
| 14 | ESCAB7627_0644 | | ZP_02900823 | |
| 15 | SSON_3896 | aadA | YP_312670 | |
| 16 | SFxv_4148 | | ADA76108 | |
| 17 | SD1617_0118 | | ZP_07678322 | |
| 18 | ESCAB7627_0650 | | ZP_02900555 | |
| 19 | HMPREF9530_04295 | | ZP_07154150 | |
| 20 | SD1617_0032 | | ZP_07678236 | |
| 21 | SC109 | ccgA2 | YP_209411 | plasmid pSC138 |
| 22 | pEFER_0049 | | YP_002394596 | plasmid pEFER |
| 23 | SD1617_4863 | | ZP_07682961 | |
| 24 | SD1617_0123 | | ZP_07678327 | |
| 25 | ECED1_1050 | | YP_002397074 | |
| 26 | SD1617_0043 | | ZP_07678247 | |
| 27 | ESCCO14588_3315 | | ZP_03445386 | |
| 28 | SD1617_0122 | | ZP_07678326 | |
| 29 | UMNK88_1471 | | AEE56075 | |
| 30 | ECS88_2899 | rusA | YP_002392541 | |
| 31 | Sente_010100023234 | | ZP_02563153 | |
| 32 | ETAE_p040 | | YP_003297634 | plasmid pEIB202 |
| 33 | EcolO157_010100025333 | | ZP_02795604 | |
| 34 | BWG_3989 | fecR | YP_002929180 | |
| 35 | HMPREF9551_05588 | | ZP_07192915 | |
| 36 | Z1242 | dmsC | NP_286773 | |
| 37 | ECD_04153 | fecE | ACT45937 | |
| 38 | ENC_36610 | | CBK86965 | |
| 39 | HMPREF9538_03067 | | ZP_08305382 | |
| 40 | HMPREF9550_02956 | | ZP_07146070 | |
| 41 | HMPREF0484_0234 | fecA | ZP_06013219 | |
| 42 | SSON_4460 | fecD | YP_313172 | |
| 43 | SD1617_4069 | | ZP_07682183 | |
| 44 | Salmonellentericaenterica_010100012935 | | ZP_03412076 | |
| 45 | Sdys1_01002088 | | ZP_00921058 | |
| 46 | SbBS512_E0266 | | YP_001879059 | |
| 47 | EC042_2952 | | CBG35781 | |
| 48 | HMPREF9540_02755 | | ZP_07135552 | |
| 49 | EscherichcoliO157_010100012850 | | ZP_03082702 | |
| 50 | EcolE2_01002516 | | ZP_00729149 | |

TABLE 21e
Data for Shigella species (continued)

| No. | Start.Coord | End.Coord | Strand | Scaffold.ID |
|---|---|---|---|---|
| 1 | 6987 | 7817 | + | 648291751 |
| 2 | 10102 | 10662 | − | 648292991 |
| 3 | 2726 | 5692 | − | 648294279 |
| 4 | 4067283 | 4067942 | + | 651053007 |
| 5 | 1128245 | 1129249 | + | 646862363 |
| 6 | 12375 | 12701 | − | 638365528 |
| 7 | 4692 | 5189 | − | 648291885 |
| 8 | 14252 | 14776 | + | 638365528 |
| 9 | 3950954 | 3952570 | − | 646862363 |
| 10 | 8898 | 9719 | − | 648292023 |
| 11 | 5423 | 6016 | − | 648291712 |
| 12 | 1107342 | 1107968 | + | 646862363 |
| 13 | 32101 | 32916 | − | 646311959 |
| 14 | 233492 | 234697 | − | 641784575 |
| 15 | 4110458 | 4111246 | − | 640427102 |
| 16 | 3954100 | 3955767 | − | 646862363 |
| 17 | 94539 | 95570 | + | 649994652 |
| 18 | 238788 | 239996 | − | 641784575 |
| 19 | 2693 | 3169 | + | 648290614 |
| 20 | 9270 | 9803 | − | 649994652 |
| 21 | 84616 | 85080 | − | 637000354 |
| 22 | 48658 | 49503 | + | 643692014 |
| 23 | 80678 | 81835 | − | 649994698 |
| 24 | 98900 | 99016 | − | 649994652 |
| 25 | 1066134 | 1066832 | + | 643348624 |
| 26 | 17832 | 18008 | + | 649994652 |
| 27 | 383590 | 384330 | − | 642987534 |
| 28 | 98413 | 98754 | − | 649994652 |
| 29 | 1420478 | 1421209 | − | 651053088 |
| 30 | 2863316 | 2863705 | − | 644736332 |
| 31 | 17544 | 17792 | + | 641746180 |
| 32 | 31237 | 32040 | − | 646311959 |
| 33 | 65402 | 65668 | − | 641781914 |
| 34 | 4453522 | 4454475 | − | 644736346 |
| 35 | 1327 | 1764 | − | 648293234 |
| 36 | 1164368 | 1165231 | + | 637000062 |
| 37 | 4424087 | 4424854 | − | 646862369 |
| 38 | 3698592 | 3699494 | − | 650378029 |
| 39 | 2039 | 3037 | − | 651333309 |
| 40 | 271 | 792 | + | 648290104 |
| 41 | 4245 | 6485 | + | 647009762 |
| 42 | 4731572 | 4732528 | − | 640427102 |
| 43 | 500702 | 501520 | + | 649994690 |
| 44 | 43535 | 45085 | + | 643042589 |
| 45 | 19505 | 20209 | − | 638365539 |
| 46 | 266116 | 266985 | − | 641522725 |
| 47 | 3140492 | 3141238 | − | 646862421 |
| 48 | 1421 | 1912 | − | 648288078 |
| 49 | 103370 | 103972 | + | 642792886 |
| 50 | 35676 | 36281 | − | 638358744 |

TABLE 22a
Data for Shigella species

| No. | Scaffold.External.Accession | Scaffold.Name | best_pv |
|---|---|---|---|
| 1 | NZ_ADUB01000093 | Escherichia coli MS 175-1 E_coli175-1-1.0_Cont166.1: NZ_ADUB01000093 | 6.86676649351252e−56 |
| 2 | NZ_ADUD01000475 | Escherichia coli MS 196-1 E_coli196-1-1.0_Cont1343.1: NZ_ADUD01000475 | 4.14817893591733e−46 |
| 3 | NZ_ADWT01000006 | Escherichia coli MS 124-1 E_coliMS124-1-1.0.1_Cont5.1: NZ_ADWT01000006 | 4.14817893591733e−46 |
| 4 | AP011957 | Salmonella enterica subsp. enterica serovar Typhimurium str. T000240 | 1.24332752332433e−44 |
| | | DNA: AP011957 | |
| 5 | CP001383 | Shigella flexneri 2002017: CP001383 | 5.69762827081762e−37 |
| 6 | NZ_AAMJ01000001 | Shigella dysenteriae 1012, unfinished sequence: NZ_AAMJ01000001 | 3.04086824044829e−34 |
| 7 | NZ_ADUB01000227 | Escherichia coli MS 175-1 E_coli175-1-1.0_Cont422.2: NZ_ADUB01000227 | 3.04086824044829e−34 |
| 8 | NZ_AAMJ01000001 | Shigella dysenteriae 1012, unfinished sequence: NZ_AAMJ01000001 | 5.67507153238613e−34 |
| 9 | CP001383 | Shigella flexneri 2002017: CP001383 | 1.46728061376833e−26 |
| 10 | NZ_ADUB01000365 | Escherichia coli MS 175-1 E_coli175-1-1.0_Cont823.2: NZ_ADUB01000365 | 4.97695865217724e−26 |
| 11 | NZ_ADUB01000054 | Escherichia coli MS 175-1 E_coli175-1-1.0_Cont100.1: NZ_ADUB01000054 | 1.31351033204593e−24 |
| 12 | CP001383 | Shigella flexneri 2002017: CP001383 | 1.66700615646725e−24 |
| 13 | NC_013509 | Edwardsiella tarda EIB202 plasmid pEIB202: NC_013509 | 3.081692811393e−24 |
| 14 | NZ_ABKX01000001 | Escherichia albertii TW07627, unfinished sequence: NZ_ABKX01000001 | 3.45432516278107e−24 |
| 15 | NC_007384 | Shigella sonnei Ss046: NC_007384 | 4.84345172785563e−23 |
| 16 | CP001383 | Shigella flexneri 2002017: CP001383 | 1.59570448713613e−17 |
| 17 | NZ_ABKX01000001 | Escherichia albertii TW07627, unfinished sequence: NZ_ABKX01000001 | 5.88113462200155e−17 |
| 18 | NC_011743 | Escherichia fergusonii ATCC 35469 plasmid pEFER: NC_011743 | 6.18164438611072e−13 |
| 19 | NZ_ADUT01000048 | Shigella dysenteriae 1617 gss1617.assembly.53: NZ_ADUT01000048 | 6.40162543140323e−12 |
| 20 | NC_011745 | Escherichia coli ED1a: NC_011745 | 2.16302499579491e−11 |
| 21 | NZ_ABKY02000005 | Escherichia coli O157:H7 str. TW14588, unfinished sequence: | 4.43701528503845e−11 |
| | | NZ_ABKY02000005 | |
| 22 | NC_011742 | Escherichia coli S88: NC_011742 | 2.05879614239143e−10 |
| 23 | NC_013509 | Edwardsiella tarda EIB202 plasmid pEIB202: NC_013509 | 4.04449595701974e−10 |
| 24 | NZ_AAJV01000016 | Escherichia coli E22, unfinished sequence: NZ_AAJV01000016 | 1.17232056049228e−08 |
| 25 | NC_012731 | Klebsiella pneumoniae NTUH-K2044: NC_012731 | 1.74593394018129e−08 |
| 26 | NC_011740 | Escherichia fergusonii ATCC 35469: NC_011740 | 2.08793524887857e−08 |
| 27 | NC_011740 | Escherichia fergusonii ATCC 35469: NC_011740 | 3.5987076197447e−08 |
| 28 | NZ_GG749327 | Escherichia coli B354 genomic scaffold supercont1.2: NZ_GG749327 | 3.5987076197447e−08 |
| 29 | NZ_ADTP01000357 | Escherichia coli MS 69-1 E_coli69-1-1.0_Cont727.1: NZ_ADTP01000357 | 3.5987076197447e−08 |
| 30 | NC_008258 | Shigella flexneri 5 str. 8401: NC_008258 | 3.5987076197447e−08 |
| 31 | NC_008258 | Shigella flexneri 5 str. 8401: NC_008258 | 3.6014669209108e−08 |
| 32 | NC_011093 | Salmonella enterica subsp. enterica serovar Schwarzengrund str. | 4.21633659816666e−08 |
| | | CVM19633 plasmid pCVM19633_4: NC_011093 | |
| 33 | NZ_ABWL01000002 | Citrobacter youngae ATCC 29220 C_sp-1.0_Cont0.2: NZ_ABWL01000002 | 5.87968902033994e−08 |
| 34 | NC_011740 | Escherichia fergusonii ATCC 35469: NC_011740 | 5.87968902033994e−08 |
| 35 | NZ_ADUT01000013 | Shigella dysenteriae 1617 gss1617.assembly.21: NZ_ADUT01000013 | 5.87968902033994e−08 |
| 36 | NC_010658 | Shigella boydii CDC 3083-94: NC_010658 | 5.87968902033994e−08 |
| 37 | NC_011740 | Escherichia fergusonii ATCC 35469: NC_011740 | 5.87968902033994e−08 |
| 38 | NZ_ABEJ01000032 | Salmonella enterica subsp. enterica serovar Schwarzengrund str. SL480, | 6.12813910192695e−08 |
| | | unfinished sequence: NZ_ABEJ01000032 | |
| 39 | NC_009345 | Shigella sonnei Ss046 plasmid pSS046_spA: NC_009345 | 7.76943438061442e−08 |
| 40 | NC_011740 | Escherichia fergusonii ATCC 35469: NC_011740 | 8.81464918585737e−08 |
| 41 | NZ_ABKX01000001 | Escherichia albertii TW07627, unfinished sequence: NZ_ABKX01000001 | 1.19080570281449e−07 |
| 42 | CP001671 | Escherichia coli ABU 83972: CP001671 | 1.50273530777206e−07 |
| 43 | CP001637 | Escherichia coli DH1: CP001637 | 2.0405961424353e−07 |
| 44 | NC_004741 | Shigella flexneri 2a str. 2457T: NC_004741 | 2.0405961424353e−07 |
| 45 | NZ_AAKB01000013 | Escherichia coli 53638, unfinished sequence: NZ_AAKB01000013 | 2.08917442901333e−07 |
| 46 | NZ_ADUL01000041 | Escherichia coli 2362-75 gec2362.assembly.47: NZ_ADUL01000041 | 2.54562372489639e−07 |
| 47 | NZ_ABKX01000001 | Escherichia albertii TW07627, unfinished sequence: NZ_ABKX01000001 | 3.82958267583033e−07 |
| 48 | NZ_ADTR01000289 | Escherichia coli MS 21-1 E_coli21-1-1.0_Cont515.2: NZ_ADTR01000289 | 3.97520776634592e−07 |
| 49 | NC_010658 | Shigella boydii CDC 3083-94: NC_010658 | 4.00202730594618e−07 |
| 50 | NZ_GG657366 | Citrobacter sp. 30_2 genomic scaffold supercont1.1: NZ_GG657366 | 4.18196454987758e−07 |

TABLE 22b
Data for Shigella species

| No. | sign_phenos | sign_phenos_class | best_pheno | best_pheno_class |
|---|---|---|---|---|
| 1 | AM; A/S; AUG; T/S | lactam; other | AUG | lactam |
| 2 | AM; A/S; AUG; T/S | lactam; other | AUG | lactam |
| 3 | AM; A/S; AUG; T/S | lactam; other | AUG | lactam |
| 4 | AM; A/S; AUG; T/S | lactam; other | AUG | lactam |
| 5 | AM; A/S; AUG | lactam | AUG | lactam |
| 6 | T/S | other | T/S | other |
| 7 | T/S | other | T/S | other |
| 8 | T/S | other | T/S | other |
| 9 | T/S | other | T/S | other |
| 10 | T/S | other | T/S | other |
| 11 | AM; A/S; AUG; T/S | lactam; other | AUG | lactam |
| 12 | AM; A/S; AUG; T/S | lactam; other | AUG | lactam |
| 13 | A/S; AUG; T/S | lactam; other | T/S | other |
| 14 | AM; A/S; AUG; T/S | lactam; other | AUG | lactam |
| 15 | AM; A/S; AUG; T/S | lactam; other | AUG | lactam |
| 16 | T/S | other | T/S | other |
| 17 | AM; A/S; AUG | lactam | AUG | lactam |
| 18 | T/S | other | T/S | other |
| 19 | AM; A/S; AUG | lactam | AUG | lactam |
| 20 | AM; A/S; AUG; T/S | lactam; other | AM | lactam |
| 21 | AM; A/S; AUG | lactam | A/S | lactam |
| 22 | T/S | other | T/S | other |
| 23 | T/S | other | T/S | other |
| 24 | AM; A/S; T/S | lactam; other | AM | lactam |
| 25 | AM; A/S; T/S | lactam; other | AM | lactam |
| 26 | AM; A/S; AUG | lactam | AM | lactam |
| 27 | AM; A/S; T/S | lactam; other | AM | lactam |
| 28 | AM; A/S; T/S | lactam; other | AM | lactam |
| 29 | AM; A/S; T/S | lactam; other | AM | lactam |
| 30 | AM; A/S; T/S | lactam; other | AM | lactam |
| 31 | AM; A/S; AUG | lactam | AUG | lactam |
| 32 | AM; A/S; AUG | lactam | AM | lactam |
| 33 | AM; A/S; T/S | lactam; other | A/S | lactam |
| 34 | AM; A/S; T/S | lactam; other | A/S | lactam |
| 35 | AM; A/S; T/S | lactam; other | A/S | lactam |
| 36 | AM; A/S; T/S | lactam; other | A/S | lactam |
| 37 | AM; A/S; T/S | lactam; other | A/S | lactam |
| 38 | AM; A/S; AUG; T/S | lactam; other | T/S | other |
| 39 | AM; A/S; AUG; T/S | lactam; other | T/S | other |
| 40 | AM; A/S; AUG; T/S | lactam; other | AUG | lactam |
| 41 | AM; A/S; AUG | lactam | A/S | lactam |
| 42 | AM; A/S; T/S | lactam; other | AM | lactam |
| 43 | AM; A/S; AUG | lactam | A/S | lactam |
| 44 | AM; A/S; AUG | lactam | A/S | lactam |
| 45 | AM; A/S; AUG | lactam | AM | lactam |
| 46 | AM; A/S; AUG; T/S | lactam; other | A/S | lactam |
| 47 | AM; A/S; AUG | lactam | A/S | lactam |
| 48 | AM; A/S; T/S | lactam; other | AM | lactam |
| 49 | AM; A/S; T/S | lactam; other | T/S | other |
| 50 | AM; A/S; AUG | lactam | AM | lactam |

TABLE 22c
Data for Shigella species

| No . | num_lactam | num_other | AM_pv_adj | A/S_pv_adj | AUG_pv_adj | T/S_pv_adj |
|---|---|---|---|---|---|---|
| 1 | 3 | 1 | 2.50E−24 | 2.78E−27 | 6.87E−56 | 6.43E−03 |
| 2 | 3 | 1 | 3.96E−18 | 5.18E−21 | 4.15E−46 | 3.89E−03 |
| 3 | 3 | 1 | 1.61E−18 | 1.80E−21 | 4.15E−46 | 2.75E−03 |
| 4 | 3 | 1 | 1.48E−18 | 1.80E−21 | 1.24E−44 | 5.45E−03 |
| 5 | 3 | 0 | 6.38E−20 | 1.76E−12 | 5.70E−37 | 1.36E−02 |
| 6 | 0 | 1 | 4.19E−01 | 7.59E−01 | 1.18E−01 | 3.04E−34 |
| 7 | 0 | 1 | 4.19E−01 | 7.59E−01 | 1.18E−01 | 3.04E−34 |
| 8 | 0 | 1 | 4.14E−01 | 6.88E−01 | 1.42E−01 | 5.68E−34 |
| 9 | 0 | 1 | 5.86E−01 | 9.62E−01 | 1.89E−01 | 1.47E−26 |
| 10 | 0 | 1 | 6.64E−01 | 8.98E−01 | 3.47E−01 | 4.98E−26 |
| 11 | 3 | 1 | 1.30E−12 | 6.35E−09 | 1.31E−24 | 1.10E−04 |
| 12 | 3 | 1 | 8.43E−13 | 4.07E−09 | 1.67E−24 | 3.04E−05 |
| 13 | 2 | 1 | 5.59E−02 | 5.39E−03 | 8.83E−03 | 3.08E−24 |
| 14 | 3 | 1 | 6.77E−13 | 3.67E−09 | 3.45E−24 | 4.57E−05 |
| 15 | 3 | 1 | 1.11E−11 | 1.11E−08 | 4.84E−23 | 3.29E−12 |
| 16 | 0 | 1 | 7.13E−01 | 9.56E−01 | 8.48E−02 | 1.60E−17 |
| 17 | 3 | 0 | 7.73E−05 | 2.34E−06 | 5.88E−17 | 9.61E−01 |
| 18 | 0 | 1 | 5.80E−01 | 2.16E−01 | 2.14E−01 | 6.18E−13 |
| 19 | 3 | 0 | 5.45E−03 | 1.12E−03 | 6.40E−12 | 1.67E−01 |
| 20 | 3 | 1 | 2.16E−11 | 8.03E−10 | 4.80E−05 | 1.95E−03 |
| 21 | 3 | 0 | 2.93E−08 | 4.44E−11 | 1.86E−03 | 1.59E−01 |
| 22 | 0 | 1 | 1.01E−01 | 3.04E−02 | 5.99E−01 | 2.06E−10 |
| 23 | 0 | 1 | 6.37E−01 | 2.87E−01 | 2.49E−01 | 4.04E−10 |
| 24 | 2 | 1 | 1.17E−08 | 4.60E−05 | 3.74E−02 | 7.92E−04 |
| 25 | 2 | 1 | 1.75E−08 | 3.59E−04 | 9.59E−02 | 5.74E−05 |
| 26 | 3 | 0 | 2.09E−08 | 6.13E−08 | 3.86E−05 | 4.21E−01 |
| 27 | 2 | 1 | 3.60E−08 | 2.62E−04 | 7.92E−02 | 9.64E−04 |
| 28 | 2 | 1 | 3.60E−08 | 5.37E−04 | 7.92E−02 | 1.59E−04 |
| 29 | 2 | 1 | 3.60E−08 | 2.62E−04 | 7.92E−02 | 9.64E−04 |
| 30 | 2 | 1 | 3.60E−08 | 5.37E−04 | 7.92E−02 | 1.59E−04 |
| 31 | 3 | 0 | 6.06E −04 | 1.15E−05 | 3.60E−08 | 1.18E−02 |
| 32 | 3 | 0 | 4.22E−08 | 6.96E−07 | 1.35E−04 | 3.01E−02 |
| 33 | 2 | 1 | 2.70E−07 | 5.88E−08 | 1.78E−01 | 7.31E−04 |
| 34 | 2 | 1 | 2.70E−07 | 5.88E−08 | 1.78E−01 | 7.31E−04 |
| 35 | 2 | 1 | 2.70E−07 | 5.88E−08 | 1.78E−01 | 7.31E−04 |
| 36 | 2 | 1 | 2.70E−07 | 5.88E−08 | 1.78E−01 | 7.31E−04 |
| 37 | 2 | 1 | 2.70E−07 | 5.88E−08 | 1.78E−01 | 7.31E−04 |
| 38 | 3 | 1 | 3.43E−04 | 1.83E−03 | 7.05E−04 | 6.13E−08 |
| 39 | 3 | 1 | 8.13E−05 | 5.17E−04 | 3.23E−04 | 7.77E−08 |
| 40 | 3 | 1 | 2.18E−04 | 3.33E−06 | 8.81E−08 | 1.34E−03 |
| 41 | 3 | 0 | 5.77E−06 | 1.19E−07 | 6.46E−03 | 3.28E−01 |
| 42 | 2 | 1 | 1.50E−07 | 1.17E−03 | 6.39E−02 | 1.05E−04 |
| 43 | 3 | 0 | 1.24E−05 | 2.04E−07 | 6.60E−03 | 3.27E−01 |
| 44 | 3 | 0 | 1.24E−05 | 2.04E−07 | 6.60E−03 | 3.27E−01 |
| 45 | 3 | 0 | 2.09E−07 | 1.92E−06 | 4.75E−05 | 4.59E−01 |
| 46 | 3 | 1 | 1.84E−04 | 2.55E−07 | 1.33E−06 | 3.22E−03 |
| 47 | 3 | 0 | 1.32E−05 | 3.83E−07 | 8.66E−03 | 2.79E−01 |
| 48 | 2 | 1 | 3.98E−07 | 1.01E−05 | 1.08E−01 | 3.36E−03 |
| 49 | 2 | 1 | 3.82E−05 | 1.71E−03 | 2.98E−01 | 4.00E−07 |
| 50 | 3 | 0 | 4.18E−07 | 3.44E−06 | 2.44E−03 | 1.37E−01 |

TABLE 22d
Data for Shigella species

| No. | Locus.Tag | Gene.Symbol | GenBank.Accession | Chromosome |
|---|---|---|---|---|
| 1 | HMPREF9547_01191 | | ZP_07167682 | |
| 2 | HMPREF9551_04221 | | ZP_07191576 | |
| 3 | HMPREF9347_01086 | | ZP_07208640 | |
| 4 | STMDT12_C39170 | | BAJ38860 | |
| 5 | SFxv_1168 | | ADA73425 | |
| 6 | Sdys1_01000012 | | ZP_00922750 | |
| 7 | HMPREF9547_02735 | | ZP_07169192 | |
| 8 | Sdys1_01000013 | | ZP_00922751 | |
| 9 | SFxv_4146 | | ADA76106 | |
| 10 | HMPREF9547_04432 | | ZP_07170853 | |
| 11 | HMPREF9547_00721 | | ZP_07167228 | |
| 12 | SFxv_1141 | | ADA73399 | |
| 13 | ETAE_p041 | folP | YP_003297635 | plasmid pEIB202 |
| 14 | ESCAB7627_0644 | | ZP_02900823 | |
| 15 | SSON_3896 | aadA | YP_312670 | |
| 16 | SFxv_4148 | | ADA76108 | |
| 17 | ESCAB7627_0650 | | ZP_02900555 | |
| 18 | pEFER_0049 | | YP_002394596 | plasmid pEFER |
| 19 | SD1617_4863 | | ZP_07682961 | |
| 20 | ECED1_1050 | | YP_002397074 | |
| 21 | ESCCO14588_3315 | | ZP_03445386 | |
| 22 | ECS88_2899 | rusA | YP_002392541 | |
| 23 | ETAE_p040 | | YP_003297634 | plasmid pEIB202 |
| 24 | EcolE2_01002516 | | ZP_00729149 | |
| 25 | KP1_1529 | betB | YP_002918349 | |
| 26 | EFER_2751 | fhiA | YP_002383857 | |
| 27 | EFER_1964 | | YP_002383093 | |
| 28 | ECEG_03397 | | ZP_06652297 | |
| 29 | HMPREF9534_04860 | | ZP_07189724 | |
| 30 | SFV_0325 | betT | YP_687904 | |
| 31 | SFV_3136 | tsaC | YP_690497 | |
| 32 | SeSA_C0004 | | YP_002113008 | plasmid |
| | | | | pCVM19633_4 |
| 33 | CIT292_00036 | | ZP_03834370 | |
| 34 | EFER_4022 | phoU | YP_002385049 | |
| 35 | SD1617_0888 | pstA | ZP_07679073 | |
| 36 | SbBS512_E4201 | pstC | YP_001882442 | |
| 37 | EFER_4026 | pstS | YP_002385053 | |
| 38 | Senteenterica_010100025269 | | ZP_02664569 | |
| 39 | SSON_PA02 | tetA | YP_001139953 | plasmid |
| | | | | pSS046_spA |
| 40 | EFER_4455 | | YP_002385453 | |
| 41 | ESCAB7627_0589 | agaF | ZP_02900787 | |
| 42 | ECABU_c04070 | betA | ADN45010 | |
| 43 | EcDH1_0571 | | ACX38258 | |
| 44 | S3383 | agaV | NP_838641 | |
| 45 | Ecol5_01002315 | | ZP_00735973 | |
| 46 | EC236275_0400 | | ZP_07778877 | |
| 47 | ESCAB7627_0593 | | ZP_02900381 | |
| 48 | HMPREF9530_03165 | | ZP_07153036 | |
| 49 | SbBS512_E1297 | | YP_001879929 | |
| 50 | CSAG_02340 | | ZP_04563010 | |

TABLE 22e
Data for Shigella species

| No. | Start.Coord | End.Coord | Strand | Scaffold.ID |
|---|---|---|---|---|
| 1 | 6987 | 7817 | + | 648291751 |
| 2 | 10102 | 10662 | − | 648292991 |
| 3 | 2726 | 5692 | − | 648294279 |
| 4 | 4067283 | 4067942 | + | 651053007 |
| 5 | 1128245 | 1129249 | + | 646862363 |
| 6 | 12375 | 12701 | − | 638365528 |
| 7 | 4692 | 5189 | − | 648291885 |
| 8 | 14252 | 14776 | + | 638365528 |
| 9 | 3950954 | 3952570 | − | 646862363 |
| 10 | 8898 | 9719 | − | 648292023 |
| 11 | 5423 | 6016 | − | 648291712 |
| 12 | 1107342 | 1107968 | + | 646862363 |
| 13 | 32101 | 32916 | − | 646311959 |
| 14 | 233492 | 234697 | − | 641784575 |
| 15 | 4110458 | 4111246 | − | 640427102 |
| 16 | 3954100 | 3955767 | − | 646862363 |
| 17 | 238788 | 239996 | − | 641784575 |
| 18 | 48658 | 49503 | + | 643692014 |
| 19 | 80678 | 81835 | − | 649994698 |
| 20 | 1066134 | 1066832 | + | 643348624 |
| 21 | 383590 | 384330 | − | 642987534 |
| 22 | 2863316 | 2863705 | − | 644736332 |
| 23 | 31237 | 32040 | − | 646311959 |
| 24 | 35676 | 36281 | − | 638358744 |
| 25 | 1469088 | 1470560 | − | 646564530 |
| 26 | 2808563 | 2810692 | + | 643692013 |
| 27 | 2010341 | 2013862 | − | 643692013 |
| 28 | 167911 | 168516 | − | 647536674 |
| 29 | 4513 | 7977 | − | 648289846 |
| 30 | 342056 | 344089 | + | 637000590 |
| 31 | 3209986 | 3212835 | − | 637000590 |
| 32 | 2398 | 3933 | − | 642555220 |
| 33 | 7614 | 8387 | + | 643891493 |
| 34 | 4127070 | 4127795 | − | 643692013 |
| 35 | 217087 | 217971 | − | 649994663 |
| 36 | 3927571 | 3928530 | + | 641522725 |
| 37 | 4130610 | 4131650 | − | 643692013 |
| 38 | 35858 | 36535 | − | 641777693 |
| 39 | 1155 | 2429 | + | 640427123 |
| 40 | 4539896 | 4540645 | + | 643692013 |
| 41 | 182707 | 183141 | − | 641784575 |
| 42 | 425884 | 427554 | − | 648231700 |
| 43 | 602662 | 603063 | − | 646862383 |
| 44 | 3261857 | 3262366 | + | 637000219 |
| 45 | 39234 | 40157 | − | 638359205 |
| 46 | 26968 | 27516 | − | 649994608 |
| 47 | 185313 | 186593 | − | 641784575 |
| 48 | 5665 | 6162 | − | 648290513 |
| 49 | 1184368 | 1184799 | + | 641522725 |
| 50 | 2538496 | 2539857 | + | 646206732 |

### Example 12

### Staphylococcus, particularly S. aureus

[0292] The procedure was carried out as in Example 1, except for the following changes:

[0293] Bacterial Strains

[0294] The inventors selected 1001 specimens of S. aureus from the microbiology strain collection at Siemens Healthcare Diagnostics (West Sacramento, Calif.) for susceptibility testing and whole genome sequencing, of which 985 had an assembly, a unique Kiel NGS ID (NGS data and assembly ID, a unique resistance profile (no different resistance profiles with different outcomes, and at least one drug with non-missing resistance value, so that these were further analyzed.

[0295] From MetaRef, 754 centroids of S. aureus were used as reference sequences.

[0296] Resistance/susceptibility was determined for the following antibiotics as described below: Amoxicillin/Clavulanate, Ampicillin, Ampicillin/Sulbactam, Azithromycin, Cefalothin, Cefazolin, Cefepime, Cefotaxime, Cefoxitin, Ceftriaxone, Cefuroxime, Chloramphenicol, Ciprofloxacin, Clindamycin, Daptomycin, Ertapenem, Erythromycin, Fosfomycin, Fusidic acid, Gentamicin, Imipenem, Levofloxacin, Linezolid, Meropenem, Moxifloxacin, Mupirocin, Nitrofurantoin, Norfloxacin, Ofloxacin, Oxacillin, Penicillin G, Piperacillin/Tazobactam, Quinupristin/Dalfopristin, Rifampicin, Teicoplanin, Tetracycline, Tigecycline, Tobramycin, Trimethoprim/Sulfamethoxazole, and Vancomycin.

[0297] For testing, standard procedures were used, i.e. VITEK 2 system and AST cards (Biomerieux), Microscan system and AST panels (Beckmann Coulter).

[0298] DNA Extraction

[0299] DNA extraction and purification was carried out using the MagAttract HMW DNA Kit (Qiagen) procedure with the following changes. After up to 2×10⁹ bacteria (1m1 culture) were centrifuged in a 2 ml tube (10 min, 5000 ×g) and the supernatant was discharged, it was again centrifuged 1 min and the sample was taken. The resulting pellet was dispersed in 160 μl P1, 20 μl lysozyme (100 mg/ml) and 4 μl lysostaphin were added and mixed, and the suspension was incubated at 37° C. at 900 rpm for 30 mins in a thermal mixer. Afterwards 300 μl lysis buffer and proteinase K (30 μl) (both from the blood kit for Maxwell of Promega) were added and the whole again incubated for 30 mins at 56° C. and 900 rpm. The samples as a whole (˜510 μl) were then transferred to the Maxwell cartridges for further processing, using the Tissue LEV Total RNA Kit AS1220 or the XAS1220 Custom Kit (Promega).

[0300] Next generation sequencing and data analysis was carried out as in Example 1.

[0301] The results for S. aureus are shown in Tables 23 (corresponding to Table 1) and 24 (corresponding to Table 2).

TABLE 23a
Data for Staphylococcus, particularly S. aureus

| No. | Scaffold.External.Accession | Scaffold.Name | best_pv |
|---|---|---|---|
| 1 | NZ_ACJC01000132 | Staphylococcus epidermidis W23144: NZ_ACJC01000132 | 9.38479881072327e−227 |
| 2 | NZ_ADMU01000036 | Staphylococcus epidermidis M23864: W2 (grey) contig00037: | 9.38479881072327e−227 |
| | | NZ_ADMU01000036 | |
| 3 | NZ_ADMU01000036 | Staphylococcus epidermidis M23864: W2 (grey) contig00037: | 2.67435403500704e−225 |
| | | NZ_ADMU01000036 | |
| 4 | NZ_GG770515 | Staphylococcus aureus subsp. aureus EMRSA16 genomic scaffold | 1.77186061517335e−211 |
| | | supercont1.3: NZ_GG770515 | |
| 5 | NZ_ACHE01000064 | Staphylococcus epidermidis BCM-HMP0060: NZ_ACHE01000064 | 3.22333061264623e−210 |
| 6 | NZ_ACKJ01000008 | Staphylococcus aureus A9719: NZ_ACKJ01000008 | 4.28801157250818e−188 |
| 7 | FN433596 | Staphylococcus aureus subsp. aureus TW20: FN433596 | 6.72085159673615e−181 |
| 8 | FN433596 | Staphylococcus aureus subsp. aureus TW20: FN433596 | 6.72085159673615e−181 |
| 9 | NC_002976 | Staphylococcus epidermidis RP62A: NC_002976 | 6.72085159673615e−181 |
| 10 | NZ_ACKF01000035 | Staphylococcus aureus A6300: NZ_ACKF01000035 | 8.5426103876016e−179 |
| 11 | NC_002976 | Staphylococcus epidermidis RP62A: NC_002976 | 8.5426103876016e−179 |
| 12 | NC_002976 | Staphylococcus epidermidis RP62A: NC_002976 | 1.81714784068785e−175 |
| 13 | NZ_ADMU01000035 | Staphylococcus epidermidis M23864: W2 (grey) contig00036: | 3.23410033711171e−175 |
| | | NZ_ADMU01000035 | |
| 14 | NC_002976 | Staphylococcus epidermidis RP62A: NC_002976 | 9.12700235375297e−175 |
| 15 | NC_002976 | Staphylococcus epidermidis RP62A: NC_002976 | 9.12700235375297e−175 |
| 16 | NC_002976 | Staphylococcus epidermidis RP62A: NC_002976 | 9.12700235375297e−175 |
| 17 | NC_002976 | Staphylococcus epidermidis RP62A: NC_002976 | 9.12700235375297e−175 |
| 18 | NC_002976 | Staphylococcus epidermidis RP62A: NC_002976 | 2.25944344923286e−173 |
| 19 | NZ_ACKF01000007 | Staphylococcus aureus A6300: NZ_ACKF01000007 | 2.40063417489507e−172 |
| 20 | NC_002976 | Staphylococcus epidermidis RP62A: NC_002976 | 2.59802993040457e−167 |
| 21 | NC_002976 | Staphylococcus epidermidis RP62A: NC_002976 | 3.12953724144125e−166 |
| 22 | NZ_ADJJ01000031 | Staphylococcus aureus A8796 cont1.31: NZ_ADJJ01000031 | 3.37208086862656e−166 |
| 23 | NC_002745 | Staphylococcus aureus subsp. aureus N315: NC_002745 | 3.37208086862656e−166 |
| 24 | NC_002976 | Staphylococcus epidermidis RP62A: NC_002976 | 7.17319474297637e−161 |
| 25 | NZ_ACHH01000128 | Staphylococcus aureus subsp. aureus TCH70: NZ_ACHH01000128 | 4.16856451727179e−152 |
| 26 | NZ_ACKC01000026 | Staphylococcus aureus A5937: NZ_ACKC01000026 | 1.58751373713434e−135 |
| 27 | NZ_ACKC01000026 | Staphylococcus aureus A5937: NZ_ACKC01000026 | 1.69633422486642e−135 |
| 28 | CP001844 | Staphylococcus aureus 04-02981: CP001844 | 1.77656315889944e−134 |
| 29 | FR714927 | Staphylococcus aureus subsp. aureus ECT-R 2: FR714927 | 4.06264970457926e−133 |
| 30 | CP001844 | Staphylococcus aureus 04-02981: CP001844 | 1.01251954267327e−130 |
| 31 | NC_007622 | Staphylococcus aureus RF122: NC_007622 | 4.84169534955158e−126 |
| 32 | NC_009632 | Staphylococcus aureus subsp. aureus JH1: NC_009632 | 6.20485118760467e−122 |
| 33 | NC_002976 | Staphylococcus epidermidis RP62A: NC_002976 | 5.75915090813908e−120 |
| 34 | NZ_ACYO01000032 | Staphylococcus aureus A8117 cont1.32: NZ_ACYO01000032 | 1.84672228386398e−116 |
| 35 | FR714927 | Staphylococcus aureus subsp. aureus ECT-R 2: FR714927 | 7.1946440374743e−116 |
| 36 | NZ_ACHD01000273 | Staphylococcus aureus subsp. aureus TCH130: NZ_ACHD01000273 | 4.22320321058421e−113 |
| 37 | NZ_ACKE01000012 | Staphylococcus aureus A6224: NZ_ACKE01000012 | 4.22320321058421e−113 |
| 38 | CP002114 | Staphylococcus aureus subsp. aureus JKD6159: CP002114 | 4.83609713640718e−112 |
| 39 | NZ_GG730131 | Staphylococcus aureus subsp. aureus C101 genomic scaffold | 4.63942446669448e−110 |
| | | supercont1.12: NZ_GG730131 | |
| 40 | NZ_ACKF01000014 | Staphylococcus aureus A6300: NZ_ACKF01000014 | 5.76090691723747e−108 |
| 41 | NZ_ACKK01000039 | Staphylococcus aureus A9763: NZ_ACKK01000039 | 2.40583396327414e−107 |
| 42 | NZ_ACKE01000008 | Staphylococcus aureus A6224: NZ_ACKE01000008 | 2.99974766558167e−106 |
| 43 | NZ_ACKG01000031 | Staphylococcus aureus A8115: NZ_ACKG01000031 | 1.57559858677166e−102 |
| 44 | NC_009632 | Staphylococcus aureus subsp. aureus JH1: NC_009632 | 1.0725409335823e−101 |
| 45 | NZ_ACYO01000003 | Staphylococcus aureus A8117 cont1.3: NZ_ACYO01000003 | 1.0725409335823e−101 |
| 46 | FR714929 | Staphylococcus aureus subsp. aureus ECT-R 2 plasmid | 5.26123840198017e−101 |
| | | pLUH02: FR714929 | |
| 47 | CP001844 | Staphylococcus aureus 04-02981: CP001844 | 8.01600909282956e−101 |
| 48 | CP001844 | Staphylococcus aureus 04-02981: CP001844 | 1.78546333248495e−95 |
| 49 | NZ_ADJK01000020 | Staphylococcus aureus A8819 cont1.20: NZ_ADJK01000020 | 1.80469278143707e−94 |
| 50 | NZ_GL545262 | Staphylococcus hominis subsp. hominis C80 genomic scaffold | 2.82728623419544e−94 |
| | | supercont1.11: NZ_GL545262 | |

TABLE 23b
Data for Staphylococcus, particularly S. aureus (continued)

| No. | sign_phenos |
|---|---|
| 1 | Ampicillin; Ampicillin/Sulbactam; Cefepim; Cefotaxim; Cefuroxim; Ciprofloxacin; Clindamycin; Erythromycin; Imipenem; |
| | Levofloxacin; Moxifloxacin; Oxacillin; Penicillin G; Piperacillin/Tazobactam; Tobramycin |
| 2 | Ampicillin; Ampicillin/Sulbactam; Cefepim; Cefotaxim; Cefuroxim; Ciprofloxacin; Clindamycin; Erythromycin; Imipenem; |
| | Levofloxacin; Moxifloxacin; Oxacillin; Penicillin G; Piperacillin/Tazobactam; Tobramycin |
| 3 | Ampicillin; Ampicillin/Sulbactam; Cefepim; Cefotaxim; Cefuroxim; Ciprofloxacin; Clindamycin; Erythromycin; Imipenem; |
| | Levofloxacin; Moxifloxacin; Oxacillin; Penicillin G; Piperacillin/Tazobactam; Tobramycin |
| 4 | Ampicillin; Ampicillin/Sulbactam; Cefepim; Cefotaxim; Cefuroxim; Ciprofloxacin; Clindamycin; Erythromycin; Imipenem; |
| | Levofloxacin; Moxifloxacin; Oxacillin; Penicillin G; Piperacillin/Tazobactam; Tobramycin |
| 5 | Ampicillin; Ampicillin/Sulbactam; Cefepim; Cefotaxim; Cefuroxim; Ciprofloxacin; Clindamycin; Erythromycin; Imipenem; |
| | Levofloxacin; Moxifloxacin; Oxacillin; Penicillin G; Piperacillin/Tazobactam; Tobramycin |
| 6 | Ampicillin; Ampicillin/Sulbactam; Cefepim; Cefotaxim; Cefuroxim; Ciprofloxacin; Clindamycin; Erythromycin; Imipenem; |
| | Levofloxacin; Moxifloxacin; Oxacillin; Penicillin G; Piperacillin/Tazobactam; Tobramycin |
| 7 | Ampicillin; Ampicillin/Sulbactam; Cefepim; Cefotaxim; Cefuroxim; Ciprofloxacin; Clindamycin; Erythromycin; Imipenem; |
| | Levofloxacin; Moxifloxacin; Oxacillin; Penicillin G; Piperacillin/Tazobactam; Tetracyclin; Tobramycin |
| 8 | Ampicillin; Ampicillin/Sulbactam; Cefepim; Cefotaxim; Cefuroxim; Ciprofloxacin; Clindamycin; Erythromycin; Imipenem; |
| | Levofloxacin; Moxifloxacin; Oxacillin; Penicillin G; Piperacillin/Tazobactam; Tetracyclin; Tobramycin |
| 9 | Ampicillin; Ampicillin/Sulbactam; Cefepim; Cefotaxim; Cefuroxim; Ciprofloxacin; Clindamycin; Erythromycin; Imipenem; |
| | Levofloxacin; Moxifloxacin; Oxacillin; Penicillin G; Piperacillin/Tazobactam; Tetracyclin; Tobramycin |
| 10 | Ampicillin; Ampicillin/Sulbactam; Cefepim; Cefotaxim; Cefuroxim; Ciprofloxacin; Clindamycin; Erythromycin; Imipenem; |
| | Levofloxacin; Moxifloxacin; Oxacillin; Penicillin G; Piperacillin/Tazobactam; Tetracyclin; Tobramycin |
| 11 | Ampicillin; Ampicillin/Sulbactam; Cefepim; Cefotaxim; Cefuroxim; Ciprofloxacin; Clindamycin; Erythromycin; Imipenem; |
| | Levofloxacin; Moxifloxacin; Oxacillin; Penicillin G; Piperacillin/Tazobactam; Tetracyclin; Tobramycin |
| 12 | Ampicillin; Ampicillin/Sulbactam; Cefepim; Cefotaxim; Cefuroxim; Ciprofloxacin; Clindamycin; Erythromycin; Imipenem; |
| | Levofloxacin; Moxifloxacin; Oxacillin; Penicillin G; Piperacillin/Tazobactam; Tetracyclin; Tobramycin |
| 13 | Ampicillin; Ampicillin/Sulbactam; Cefepim; Cefotaxim; Cefuroxim; Ciprofloxacin; Clindamycin; Erythromycin; Imipenem; |
| | Levofloxacin; Moxifloxacin; Oxacillin; Penicillin G; Piperacillin/Tazobactam; Tetracyclin; Tobramycin |
| 14 | Ampicillin; Ampicillin/Sulbactam; Cefepim; Cefotaxim; Cefuroxim; Ciprofloxacin; Clindamycin; Erythromycin; Imipenem; |
| | Levofloxacin; Moxifloxacin; Oxacillin; Penicillin G; Piperacillin/Tazobactam; Tetracyclin; Tobramycin |
| 15 | Ampicillin; Ampicillin/Sulbactam; Cefepim; Cefotaxim; Cefuroxim; Ciprofloxacin; Clindamycin; Erythromycin; Imipenem; |
| | Levofloxacin; Moxifloxacin; Oxacillin; Penicillin G; Piperacillin/Tazobactam; Tetracyclin; Tobramycin |
| 16 | Ampicillin; Ampicillin/Sulbactam; Cefepim; Cefotaxim; Cefuroxim; Ciprofloxacin; Clindamycin; Erythromycin; Imipenem; |
| | Levofloxacin; Moxifloxacin; Oxacillin; Penicillin G; Piperacillin/Tazobactam; Tetracyclin; Tobramycin |
| 17 | Ampicillin; Ampicillin/Sulbactam; Cefepim; Cefotaxim; Cefuroxim; Ciprofloxacin; Clindamycin; Erythromycin; Imipenem; |
| | Levofloxacin; Moxifloxacin; Oxacillin; Penicillin G; Piperacillin/Tazobactam; Tetracyclin; Tobramycin |
| 18 | Ampicillin; Ampicillin/Sulbactam; Cefepim; Cefotaxim; Cefuroxim; Ciprofloxacin; Clindamycin; Erythromycin; Imipenem; |
| | Levofloxacin; Moxifloxacin; Oxacillin; Penicillin G; Piperacillin/Tazobactam; Tetracyclin; Tobramycin |
| 19 | Ampicillin; Ampicillin/Sulbactam; Cefepim; Cefotaxim; Cefuroxim; Ciprofloxacin; Clindamycin; Erythromycin; Imipenem; |
| | Levofloxacin; Moxifloxacin; Oxacillin; Penicillin G; Piperacillin/Tazobactam; Tetracyclin; Tobramycin |
| 20 | Ampicillin; Ampicillin/Sulbactam; Cefepim; Cefotaxim; Cefuroxim; Ciprofloxacin; Clindamycin; Erythromycin; Imipenem; |
| | Levofloxacin; Moxifloxacin; Oxacillin; Penicillin G; Piperacillin/Tazobactam; Tetracyclin; Tobramycin |
| 21 | Ampicillin; Ampicillin/Sulbactam; Cefepim; Cefotaxim; Cefuroxim; Ciprofloxacin; Clindamycin; Erythromycin; Imipenem; |
| | Levofloxacin; Moxifloxacin; Oxacillin; Penicillin G; Piperacillin/Tazobactam; Tetracyclin; Tobramycin |
| 22 | Ampicillin; Ampicillin/Sulbactam; Cefepim; Cefotaxim; Cefuroxim; Ciprofloxacin; Clindamycin; Erythromycin; Imipenem; |
| | Levofloxacin; Moxifloxacin; Oxacillin; Penicillin G; Piperacillin/Tazobactam; Tetracyclin; Tobramycin |
| 23 | Ampicillin; Ampicillin/Sulbactam; Cefepim; Cefotaxim; Cefuroxim; Ciprofloxacin; Clindamycin; Erythromycin; Imipenem; |
| | Levofloxacin; Moxifloxacin; Oxacillin; Penicillin G; Piperacillin/Tazobactam; Tetracyclin; Tobramycin |
| 24 | Ampicillin; Ampicillin/Sulbactam; Cefepim; Cefotaxim; Cefuroxim; Ciprofloxacin; Clindamycin; Erythromycin; Imipenem; |
| | Levofloxacin; Moxifloxacin; Oxacillin; Penicillin G; Piperacillin/Tazobactam; Tetracyclin; Tobramycin |
| 25 | Ampicillin; Ampicillin/Sulbactam; Cefepim; Cefotaxim; Cefuroxim; Ciprofloxacin; Clindamycin; Erythromycin; Imipenem; |
| | Levofloxacin; Moxifloxacin; Oxacillin; Penicillin G; Piperacillin/Tazobactam; Tetracyclin; Tobramycin |
| 26 | Ampicillin/Sulbactam; Cefepim; Cefotaxim; Cefuroxim; Ciprofloxacin; Clindamycin; Erythromycin; Imipenem; Levofloxacin; |
| | Moxifloxacin; Oxacillin; Penicillin G; Piperacillin/Tazobactam; Tetracyclin; Tobramycin |
| 27 | Ampicillin/Sulbactam; Cefepim; Cefotaxim; Cefuroxim; Ciprofloxacin; Clindamycin; Erythromycin; Imipenem; Levofloxacin; |
| | Moxifloxacin; Oxacillin; Penicillin G; Piperacillin/Tazobactam; Tetracyclin; Tobramycin |
| 28 | Ampicillin/Sulbactam; Cefepim; Cefotaxim; Cefuroxim; Ciprofloxacin; Clindamycin; Erythromycin; Imipenem; Levofloxacin; |
| | Moxifloxacin; Oxacillin; Penicillin G; Piperacillin/Tazobactam; Tetracyclin; Tobramycin |
| 29 | Ampicillin/Sulbactam; Cefepim; Cefotaxim; Cefuroxim; Ciprofloxacin; Clindamycin; Erythromycin; Imipenem; Levofloxacin; |
| | Moxifloxacin; Oxacillin; Penicillin G; Piperacillin/Tazobactam; Tetracyclin; Tobramycin |
| 30 | Ampicillin/Sulbactam; Cefepim; Cefotaxim; Cefuroxim; Ciprofloxacin; Clindamycin; Erythromycin; Imipenem; Levofloxacin; |
| | Moxifloxacin; Oxacillin; Penicillin G; Piperacillin/Tazobactam; Tetracyclin; Tobramycin |
| 31 | Ampicillin; Ampicillin/Sulbactam; Cefepim; Cefotaxim; Cefuroxim; Ciprofloxacin; Clindamycin; Erythromycin; Imipenem; |
| | Levofloxacin; Moxifloxacin; Oxacillin; Penicillin G; Piperacillin/Tazobactam; Tetracyclin; Tobramycin |
| 32 | Ampicillin/Sulbactam; Cefepim; Cefotaxim; Cefuroxim; Ciprofloxacin; Clindamycin; Erythromycin; Imipenem; Levofloxacin; |
| | Moxifloxacin; Oxacillin; Penicillin G; Piperacillin/Tazobactam; Tobramycin |
| 33 | Ampicillin; Ampicillin/Sulbactam; Cefepim; Cefotaxim; Cefuroxim; Ciprofloxacin; Clindamycin; Erythromycin; Imipenem; |
| | Levofloxacin; Moxifloxacin; Oxacillin; Penicillin G; Piperacillin/Tazobactam; Tetracyclin; Tobramycin |
| 34 | Ampicillin/Sulbactam; Cefepim; Cefotaxim; Cefuroxim; Ciprofloxacin; Clindamycin; Erythromycin; Imipenem; Levofloxacin; |
| | Moxifloxacin; Oxacillin; Penicillin G; Piperacillin/Tazobactam; Tobramycin |
| 35 | Ampicillin/Sulbactam; Cefepim; Cefotaxim; Cefuroxim; Ciprofloxacin; Clindamycin; Erythromycin; Imipenem; Levofloxacin; |
| | Moxifloxacin; Oxacillin; Penicillin G; Piperacillin/Tazobactam; Tetracyclin; Tobramycin |
| 36 | Ampicillin; Ampicillin/Sulbactam; Cefepim; Cefotaxim; Cefuroxim; Ciprofloxacin; Clindamycin; Erythromycin; Imipenem; |
| | Levofloxacin; Moxifloxacin; Oxacillin; Penicillin G; Piperacillin/Tazobactam; Tetracyclin; Tobramycin |
| 37 | Ampicillin; Ampicillin/Sulbactam; Cefepim; Cefotaxim; Cefuroxim; Ciprofloxacin; Clindamycin; Erythromycin; Imipenem; |
| | Levofloxacin; Moxifloxacin; Oxacillin; Penicillin G; Piperacillin/Tazobactam; Tetracyclin; Tobramycin |
| 38 | Ampicillin/Sulbactam; Cefepim; Cefotaxim; Cefuroxim; Ciprofloxacin; Clindamycin; Erythromycin; Imipenem; Levofloxacin; |
| | Moxifloxacin; Oxacillin; Penicillin G; Piperacillin/Tazobactam; Tetracyclin; Tobramycin |
| 39 | Ampicillin/Sulbactam; Cefepim; Cefotaxim; Cefuroxim; Ciprofloxacin; Clindamycin; Erythromycin; Imipenem; Levofloxacin; |
| | Moxifloxacin; Oxacillin; Penicillin G; Piperacillin/Tazobactam; Tetracyclin; Tobramycin |
| 40 | Ampicillin/Sulbactam; Cefepim; Cefotaxim; Cefuroxim; Ciprofloxacin; Clindamycin; Erythromycin; Imipenem; Levofloxacin; |
| | Moxifloxacin; Oxacillin; Penicillin G; Piperacillin/Tazobactam; Tetracyclin; Tobramycin |
| 41 | Ampicillin/Sulbactam; Cefepim; Cefotaxim; Cefuroxim; Ciprofloxacin; Clindamycin; Erythromycin; Imipenem; Levofloxacin; |
| | Moxifloxacin; Oxacillin; Penicillin G; Piperacillin/Tazobactam; Tetracyclin; Tobramycin |
| 42 | Ampicillin/Sulbactam; Cefepim; Cefotaxim; Cefuroxim; Ciprofloxacin; Clindamycin; Erythromycin; Imipenem; Levofloxacin; |
| | Moxifloxacin; Oxacillin; Penicillin G; Piperacillin/Tazobactam; Tetracyclin; Tobramycin |
| 43 | Ampicillin/Sulbactam; Cefepim; Cefotaxim; Cefuroxim; Ciprofloxacin; Clindamycin; Erythromycin; Imipenem; Levofloxacin; |
| | Moxifloxacin; Oxacillin; Penicillin G; Piperacillin/Tazobactam; Tetracyclin; Tobramycin |
| 44 | Ampicillin/Sulbactam; Cefepim; Cefotaxim; Cefuroxim; Ciprofloxacin; Clindamycin; Erythromycin; Imipenem; Levofloxacin; |
| | Moxifloxacin; Oxacillin; Penicillin G; Piperacillin/Tazobactam; Tetracyclin; Tobramycin |
| 45 | Ampicillin/Sulbactam; Cefepim; Cefotaxim; Cefuroxim; Ciprofloxacin; Clindamycin; Erythromycin; Imipenem; Levofloxacin; |
| | Moxifloxacin; Oxacillin; Penicillin G; Piperacillin/Tazobactam; Tetracyclin; Tobramycin |
| 46 | Ampicillin; Ampicillin/Sulbactam; Cefepim; Cefotaxim; Cefuroxim; Ciprofloxacin; Clindamycin; Erythromycin; Imipenem; |
| | Levofloxacin; Moxifloxacin; Oxacillin; Penicillin G; Piperacillin/Tazobactam; Tetracyclin; Tobramycin |
| 47 | Ampicillin/Sulbactam; Cefepim; Cefotaxim; Cefuroxim; Ciprofloxacin; Clindamycin; Erythromycin; Imipenem; Levofloxacin; |
| | Moxifloxacin; Oxacillin; Penicillin G; Piperacillin/Tazobactam; Tetracyclin; Tobramycin |
| 48 | Ampicillin/Sulbactam; Cefepim; Cefotaxim; Cefuroxim; Ciprofloxacin; Clindamycin; Erythromycin; Imipenem; Levofloxacin; |
| | Moxifloxacin; Oxacillin; Penicillin G; Piperacillin/Tazobactam; Tetracyclin; Tobramycin |
| 49 | Ampicillin; Ampicillin/Sulbactam; Cefepim; Cefotaxim; Cefuroxim; Ciprofloxacin; Clindamycin; Erythromycin; Imipenem; |
| | Levofloxacin; Moxifloxacin; Oxacillin; Penicillin G; Piperacillin/Tazobactam; Tetracyclin; Tobramycin |
| 50 | Ampicillin; Ampicillin/Sulbactam; Cefepim; Cefotaxim; Cefuroxim; Ciprofloxacin; Clindamycin; Erythromycin; Imipenem; |
| | Levofloxacin; Moxifloxacin; Oxacillin; Penicillin G; Piperacillin/Tazobactam; Tetracyclin; Tobramycin |

TABLE 23c
Data for Staphylococcus, particularly S. aureus (continued)

| No. | sign_phenos_class | best_pheno | best_pheno_class |
|---|---|---|---|
| 1 | aminoglycoside; fluoroquinolone; lactam; lincosamide; macrolide | Oxacillin | lactam |
| 2 | aminoglycoside; fluoroquinolone; lactam; lincosamide; macrolide | Oxacillin | lactam |
| 3 | aminoglycoside; fluoroquinolone; lactam; lincosamide; macrolide | Oxacillin | lactam |
| 4 | aminoglycoside; fluoroquinolone; lactam; lincosamide; macrolide | Oxacillin | lactam |
| 5 | aminoglycoside; fluoroquinolone; lactam; lincosamide; macrolide | Oxacillin | lactam |
| 6 | aminoglycoside; fluoroquinolone; lactam; lincosamide; macrolide | Moxifloxacin | fluoroquinolone |
| 7 | aminoglycoside; fluoroquinolone; lactam; lincosamide; macrolide; tetracycline | Oxacillin | lactam |
| 8 | aminoglycoside; fluoroquinolone; lactam; lincosamide; macrolide; tetracycline | Oxacillin | lactam |
| 9 | aminoglycoside; fluoroquinolone; lactam; lincosamide; macrolide; tetracycline | Oxacillin | lactam |
| 10 | aminoglycoside; fluoroquinolone; lactam; lincosamide; macrolide; tetracycline | Oxacillin | lactam |
| 11 | aminoglycoside; fluoroquinolone; lactam; lincosamide; macrolide; tetracycline | Oxacillin | lactam |
| 12 | aminoglycoside; fluoroquinolone; lactam; lincosamide; macrolide; tetracycline | Oxacillin | lactam |
| 13 | aminoglycoside; fluoroquinolone; lactam; lincosamide; macrolide; tetracycline | Oxacillin | lactam |
| 14 | aminoglycoside; fluoroquinolone; lactam; lincosamide; macrolide; tetracycline | Oxacillin | lactam |
| 15 | aminoglycoside; fluoroquinolone; lactam; lincosamide; macrolide; tetracycline | Oxacillin | lactam |
| 16 | aminoglycoside; fluoroquinolone; lactam; lincosamide; macrolide; tetracycline | Oxacillin | lactam |
| 17 | aminoglycoside; fluoroquinolone; lactam; lincosamide; macrolide; tetracycline | Oxacillin | lactam |
| 18 | aminoglycoside; fluoroquinolone; lactam; lincosamide; macrolide; tetracycline | Oxacillin | lactam |
| 19 | aminoglycoside; fluoroquinolone; lactam; lincosamide; macrolide; tetracycline | Oxacillin | lactam |
| 20 | aminoglycoside; fluoroquinolone; lactam; lincosamide; macrolide; tetracycline | Moxifloxacin | fluoroquinolone |
| 21 | aminoglycoside; fluoroquinolone; lactam; lincosamide; macrolide; tetracycline | Moxifloxacin | fluoroquinolone |
| 22 | aminoglycoside; fluoroquinolone; lactam; lincosamide; macrolide; tetracycline | Moxifloxacin | fluoroquinolone |
| 23 | aminoglycoside; fluoroquinolone; lactam; lincosamide; macrolide; tetracycline | Moxifloxacin | fluoroquinolone |
| 24 | aminoglycoside; fluoroquinolone; lactam; lincosamide; macrolide; tetracycline | Moxifloxacin | fluoroquinolone |
| 25 | aminoglycoside; fluoroquinolone; lactam; lincosamide; macrolide; tetracycline | Moxifloxacin | fluoroquinolone |
| 26 | aminoglycoside; fluoroquinolone; lactam; lincosamide; macrolide; tetracycline | Moxifloxacin | fluoroquinolone |
| 27 | aminoglycoside; fluoroquinolone; lactam; lincosamide; macrolide; tetracycline | Moxifloxacin | fluoroquinolone |
| 28 | aminoglycoside; fluoroquinolone; lactam; lincosamide; macrolide; tetracycline | Moxifloxacin | fluoroquinolone |
| 29 | aminoglycoside; fluoroquinolone; lactam; lincosamide; macrolide; tetracycline | Moxifloxacin | fluoroquinolone |
| 30 | aminoglycoside; fluoroquinolone; lactam; lincosamide; macrolide; tetracycline | Moxifloxacin | fluoroquinolone |
| 31 | aminoglycoside; fluoroquinolone; lactam; lincosamide; macrolide; tetracycline | Moxifloxacin | fluoroquinolone |
| 32 | aminoglycoside; fluoroquinolone; lactam; lincosamide; macrolide | Moxifloxacin | fluoroquinolone |
| 33 | aminoglycoside; fluoroquinolone; lactam; lincosamide; macrolide; tetracycline | Moxifloxacin | fluoroquinolone |
| 34 | aminoglycoside; fluoroquinolone; lactam; lincosamide; macrolide | Moxifloxacin | fluoroquinolone |
| 35 | aminoglycoside; fluoroquinolone; lactam; lincosamide; macrolide; tetracycline | Moxifloxacin | fluoroquinolone |
| 36 | aminoglycoside; fluoroquinolone; lactam; lincosamide; macrolide; tetracycline | Moxifloxacin | fluoroquinolone |
| 37 | aminoglycoside; fluoroquinolone; lactam; lincosamide; macrolide; tetracycline | Moxifloxacin | fluoroquinolone |
| 38 | aminoglycoside; fluoroquinolone; lactam; lincosamide; macrolide; tetracycline | Moxifloxacin | fluoroquinolone |
| 39 | aminoglycoside; fluoroquinolone; lactam; lincosamide; macrolide; tetracycline | Moxifloxacin | fluoroquinolone |
| 40 | aminoglycoside; fluoroquinolone; lactam; lincosamide; macrolide; tetracycline | Moxifloxacin | fluoroquinolone |
| 41 | aminoglycoside; fluoroquinolone; lactam; lincosamide; macrolide; tetracycline | Moxifloxacin | fluoroquinolone |
| 42 | aminoglycoside; fluoroquinolone; lactam; lincosamide; macrolide; tetracycline | Moxifloxacin | fluoroquinolone |
| 43 | aminoglycoside; fluoroquinolone; lactam; lincosamide; macrolide; tetracycline | Moxifloxacin | fluoroquinolone |
| 44 | aminoglycoside; fluoroquinolone; lactam; lincosamide; macrolide; tetracycline | Moxifloxacin | fluoroquinolone |
| 45 | aminoglycoside; fluoroquinolone; lactam; lincosamide; macrolide; tetracycline | Moxifloxacin | fluoroquinolone |
| 46 | aminoglycoside; fluoroquinolone; lactam; lincosamide; macrolide; tetracycline | Moxifloxacin | fluoroquinolone |
| 47 | aminoglycoside; fluoroquinolone; lactam; lincosamide; macrolide; tetracycline | Moxifloxacin | fluoroquinolone |
| 48 | aminoglycoside; fluoroquinolone; lactam; lincosamide; macrolide; tetracycline | Moxifloxacin | fluoroquinolone |
| 49 | aminoglycoside; fluoroquinolone; lactam; lincosamide; macrolide; tetracycline | Moxifloxacin | fluoroquinolone |
| 50 | aminoglycoside; fluoroquinolone; lactam; lincosamide; macrolide; tetracycline | Oxacillin | lactam |

TABLE 23d
Data for Staphylococcus, particularly S. aureus (continued)

| No. | num_aminoglycoside | num_fluoroquinolone | num_lactam | num_lincosamide | num_macrolide | num_tetracycline |
|---|---|---|---|---|---|---|
| 1 | 1 | 3 | 9 | 1 | 1 | 0 |
| 2 | 1 | 3 | 9 | 1 | 1 | 0 |
| 3 | 1 | 3 | 9 | 1 | 1 | 0 |
| 4 | 1 | 3 | 9 | 1 | 1 | 0 |
| 5 | 1 | 3 | 9 | 1 | 1 | 0 |
| 6 | 1 | 3 | 9 | 1 | 1 | 0 |
| 7 | 1 | 3 | 9 | 1 | 1 | 1 |
| 8 | 1 | 3 | 9 | 1 | 1 | 1 |
| 9 | 1 | 3 | 9 | 1 | 1 | 1 |
| 10 | 1 | 3 | 9 | 1 | 1 | 1 |
| 11 | 1 | 3 | 9 | 1 | 1 | 1 |
| 12 | 1 | 3 | 9 | 1 | 1 | 1 |
| 13 | 1 | 3 | 9 | 1 | 1 | 1 |
| 14 | 1 | 3 | 9 | 1 | 1 | 1 |
| 15 | 1 | 3 | 9 | 1 | 1 | 1 |
| 16 | 1 | 3 | 9 | 1 | 1 | 1 |
| 17 | 1 | 3 | 9 | 1 | 1 | 1 |
| 18 | 1 | 3 | 9 | 1 | 1 | 1 |
| 19 | 1 | 3 | 9 | 1 | 1 | 1 |
| 20 | 1 | 3 | 9 | 1 | 1 | 1 |
| 21 | 1 | 3 | 9 | 1 | 1 | 1 |
| 22 | 1 | 3 | 9 | 1 | 1 | 1 |
| 23 | 1 | 3 | 9 | 1 | 1 | 1 |
| 24 | 1 | 3 | 9 | 1 | 1 | 1 |
| 25 | 1 | 3 | 9 | 1 | 1 | 1 |
| 26 | 1 | 3 | 8 | 1 | 1 | 1 |
| 27 | 1 | 3 | 8 | 1 | 1 | 1 |
| 28 | 1 | 3 | 8 | 1 | 1 | 1 |
| 29 | 1 | 3 | 8 | 1 | 1 | 1 |
| 30 | 1 | 3 | 8 | 1 | 1 | 1 |
| 31 | 1 | 3 | 9 | 1 | 1 | 1 |
| 32 | 1 | 3 | 8 | 1 | 1 | 0 |
| 33 | 1 | 3 | 9 | 1 | 1 | 1 |
| 34 | 1 | 3 | 8 | 1 | 1 | 0 |
| 35 | 1 | 3 | 8 | 1 | 1 | 1 |
| 36 | 1 | 3 | 9 | 1 | 1 | 1 |
| 37 | 1 | 3 | 9 | 1 | 1 | 1 |
| 38 | 1 | 3 | 8 | 1 | 1 | 1 |
| 39 | 1 | 3 | 8 | 1 | 1 | 1 |
| 40 | 1 | 3 | 8 | 1 | 1 | 1 |
| 41 | 1 | 3 | 8 | 1 | 1 | 1 |
| 42 | 1 | 3 | 8 | 1 | 1 | 1 |
| 43 | 1 | 3 | 8 | 1 | 1 | 1 |
| 44 | 1 | 3 | 8 | 1 | 1 | 1 |
| 45 | 1 | 3 | 8 | 1 | 1 | 1 |
| 46 | 1 | 3 | 9 | 1 | 1 | 1 |
| 47 | 1 | 3 | 8 | 1 | 1 | 1 |
| 48 | 1 | 3 | 8 | 1 | 1 | 1 |
| 49 | 1 | 3 | 9 | 1 | 1 | 1 |
| 50 | 1 | 3 | 9 | 1 | 1 | 1 |

TABLE 23e
Data for Staphylococcus, particularly S. aureus (continued)

| No. | Ampicillin_pv_adj | Ampicillin/Sulbactam_pv_adj | Cefepim_pv_adj | Cefotaxim_pv_adj |
|---|---|---|---|---|
| 1 | 2.20E−08 | 5.96E−37 | 5.96E−37 | 5.96E−37 |
| 2 | 2.20E−08 | 5.96E−37 | 5.96E−37 | 5.96E−37 |
| 3 | 2.20E−08 | 5.96E−37 | 5.96E−37 | 5.96E−37 |
| 4 | 4.64E−08 | 4.55E−35 | 4.55E−35 | 4.55E−35 |
| 5 | 2.20E−08 | 2.16E−33 | 2.16E−33 | 2.16E−33 |
| 6 | 2.22E−09 | 1.64E−31 | 1.64E−31 | 1.64E−31 |
| 7 | 3.22E−07 | 2.72E−27 | 2.72E−27 | 2.72E−27 |
| 8 | 3.22E−07 | 2.72E−27 | 2.72E−27 | 2.72E−27 |
| 9 | 3.22E−07 | 2.72E−27 | 2.72E−27 | 2.72E−27 |
| 10 | 3.22E−07 | 2.72E−27 | 2.72E−27 | 2.72E−27 |
| 11 | 3.22E−07 | 2.72E−27 | 2.72E−27 | 2.72E−27 |
| 12 | 6.85E−07 | 2.72E−27 | 2.72E−27 | 2.72E−27 |
| 13 | 2.90E−07 | 1.05E−25 | 1.05E−25 | 1.05E−25 |
| 14 | 3.22E−07 | 2.72E−27 | 2.72E−27 | 2.72E−27 |
| 15 | 3.22E−07 | 2.72E−27 | 2.72E−27 | 2.72E−27 |
| 16 | 3.22E−07 | 2.72E−27 | 2.72E−27 | 2.72E−27 |
| 17 | 3.22E−07 | 2.72E−27 | 2.72E−27 | 2.72E−27 |
| 18 | 2.90E−07 | 1.05E−25 | 1.05E−25 | 1.05E−25 |
| 19 | 2.90E−07 | 1.05E−25 | 1.05E−25 | 1.05E−25 |
| 20 | 8.65E−04 | 1.18E−21 | 1.18E−21 | 1.18E−21 |
| 21 | 8.65E−04 | 1.18E−21 | 1.18E−21 | 1.18E−21 |
| 22 | 3.21E−03 | 7.21E−21 | 7.21E−21 | 7.21E−21 |
| 23 | 3.21E−03 | 7.21E−21 | 7.21E−21 | 7.21E−21 |
| 24 | 1.55E−03 | 1.27E−19 | 1.27E−19 | 1.27E−19 |
| 25 | 1.83E−03 | 2.01E−19 | 2.01E−19 | 2.01E−19 |
| 26 | 1.26E−02 | 1.32E−20 | 1.32E−20 | 1.32E−20 |
| 27 | 1.18E−02 | 7.81E−20 | 7.81E−20 | 7.81E−20 |
| 28 | 1.18E−02 | 7.81E−20 | 7.81E−20 | 7.81E−20 |
| 29 | 1.26E−02 | 7.25E−19 | 7.25E−19 | 7.25E−19 |
| 30 | 3.28E−02 | 3.76E−18 | 3.76E−18 | 3.76E−18 |
| 31 | 4.05E−03 | 1.35E−15 | 1.35E−15 | 1.35E−15 |
| 32 | 1.24E−02 | 1.13E−19 | 1.13E−19 | 1.13E−19 |
| 33 | 1.11E−03 | 1.73E−15 | 1.73E−15 | 1.73E−15 |
| 34 | 1.27E−02 | 6.35E−19 | 6.35E−19 | 6.35E−19 |
| 35 | 2.32E−02 | 3.05E−13 | 3.05E−13 | 3.05E−13 |
| 36 | 7.10E−03 | 2.03E−18 | 2.03E−18 | 2.03E−18 |
| 37 | 7.10E−03 | 2.03E−18 | 2.03E−18 | 2.03E−18 |
| 38 | 1.24E−02 | 2.91E−15 | 2.91E−15 | 2.91E−15 |
| 39 | 3.37E−02 | 1.60E−16 | 1.60E−16 | 1.60E−16 |
| 40 | 5.70E−02 | 1.88E−12 | 1.88E−12 | 1.88E−12 |
| 41 | 1.15E−01 | 1.25E−15 | 1.25E−15 | 1.25E−15 |
| 42 | 3.84E−02 | 9.78E−11 | 9.78E−11 | 9.78E−11 |
| 43 | 3.56E−02 | 5.77E−17 | 5.77E−17 | 5.77E−17 |
| 44 | 3.37E−02 | 1.60E−16 | 1.60E−16 | 1.60E−16 |
| 45 | 3.37E−02 | 1.60E−16 | 1.60E−16 | 1.60E−16 |
| 46 | 2.90E−07 | 1.61E−15 | 1.61E−15 | 1.61E−15 |
| 47 | 7.69E−02 | 7.81E−20 | 7.81E−20 | 7.81E−20 |
| 48 | 8.07E−02 | 6.08E−12 | 6.08E−12 | 6.08E−12 |
| 49 | 2.90E−07 | 1.61E−15 | 1.61E−15 | 1.61E−15 |
| 50 | 3.04E−06 | 1.82E−17 | 1.82E−17 | 1.82E−17 |

TABLE 23f
Data for Staphylococcus, particularly S. aureus (continued)

| No. | Cefuroxim_pv_adj | Ciprofloxacin_pv_adj | Clindamycin_pv_adj | Erythromycin_pv_adj |
|---|---|---|---|---|
| 1 | 1.02E−172 | 4.82E−131 | 5.41E−111 | 1.04E−111 |
| 2 | 1.02E−172 | 4.82E−131 | 5.41E−111 | 1.04E−111 |
| 3 | 1.02E−172 | 3.02E−132 | 6.31E−112 | 7.39E−113 |
| 4 | 1.19E−170 | 1.00E−131 | 5.45E−114 | 1.72E−111 |
| 5 | 9.55E−169 | 1.65E−131 | 8.55E−113 | 3.44E−110 |
| 6 | 3.09E−155 | 2.03E−145 | 7.78E−102 | 4.54E−100 |
| 7 | 2.00E−140 | 4.08E−138 | 6.00E−125 | 2.44E−127 |
| 8 | 2.00E−140 | 5.95E−135 | 7.70E−123 | 2.44E−127 |
| 9 | 2.00E−140 | 4.08E−138 | 6.00E−125 | 2.44E−127 |
| 10 | 2.29E−138 | 2.11E−136 | 1.31E−123 | 4.65E−126 |
| 11 | 2.29E−138 | 3.02E−133 | 1.67E−121 | 4.65E−126 |
| 12 | 1.01E−138 | 1.36E−128 | 4.01E−120 | 1.01E−123 |
| 13 | 2.71E−145 | 1.43E−135 | 2.49E−122 | 2.94E−121 |
| 14 | 5.87E−142 | 6.84E−140 | 7.88E−125 | 3.61E−124 |
| 15 | 5.87E−142 | 6.84E−140 | 7.88E−125 | 3.61E−124 |
| 16 | 5.87E−142 | 6.84E−140 | 7.88E−125 | 3.61E−124 |
| 17 | 5.87E−142 | 6.84E−140 | 7.88E−125 | 3.61E−124 |
| 18 | 3.15E−140 | 6.84E−140 | 1.65E−123 | 1.01E−122 |
| 19 | 3.78E−139 | 5.24E−139 | 7.90E−123 | 4.58E−122 |
| 20 | 3.99E−125 | 5.65E−132 | 3.88E−136 | 8.83E−140 |
| 21 | 5.82E−123 | 4.09E−130 | 1.24E−134 | 2.39E−138 |
| 22 | 4.30E−124 | 5.65E−132 | 7.67E−139 | 1.30E−142 |
| 23 | 4.30E−124 | 5.65E−132 | 7.67E−139 | 1.30E−142 |
| 24 | 8.70E−122 | 4.09E−130 | 4.42E−135 | 5.01E−139 |
| 25 | 1.95E−112 | 3.48E−117 | 1.09E−121 | 8.26E−126 |
| 26 | 9.99E−102 | 2.00E−99 | 7.42E−94 | 1.88E−93 |
| 27 | 9.92E−101 | 1.25E−100 | 4.84E−95 | 2.65E−94 |
| 28 | 1.08E−99 | 6.62E−99 | 5.06E−95 | 1.80E−94 |
| 29 | 4.45E−100 | 1.46E−101 | 3.05E−98 | 1.82E−99 |
| 30 | 3.62E−99 | 6.76E−98 | 4.11E−89 | 2.04E−88 |
| 31 | 5.46E−82 | 8.46E−90 | 4.95E−69 | 2.56E−67 |
| 32 | 3.45E−93 | 1.68E−88 | 1.37E−90 | 2.27E−88 |
| 33 | 7.10E−92 | 7.29E−86 | 6.57E−78 | 1.16E−76 |
| 34 | 3.46E−90 | 5.20E−83 | 1.49E−80 | 4.89E−80 |
| 35 | 9.56E−73 | 1.94E−83 | 1.78E−63 | 2.45E−61 |
| 36 | 1.95E−83 | 3.50E−91 | 5.92E−79 | 2.14E−84 |
| 37 | 1.95E−83 | 3.50E−91 | 5.92E−79 | 2.14E−84 |
| 38 | 7.71E−76 | 4.08E−77 | 6.05E−58 | 6.49E−57 |
| 39 | 3.93E−89 | 4.20E−78 | 5.89E−71 | 3.43E−72 |
| 40 | 3.54E−69 | 3.19E−77 | 4.43E−58 | 3.86E−57 |
| 41 | 8.95E−84 | 1.49E−77 | 1.71E−74 | 1.87E−74 |
| 42 | 3.77E−75 | 8.95E−84 | 6.90E−85 | 9.85E−84 |
| 43 | 6.75E−81 | 1.60E−81 | 9.46E−72 | 9.56E−79 |
| 44 | 3.58E−81 | 2.83E−81 | 9.63E−72 | 1.15E−78 |
| 45 | 4.14E−80 | 2.83E−81 | 1.29E−70 | 1.77E−77 |
| 46 | 7.59E−62 | 5.15E−79 | 7.94E−76 | 5.98E−76 |
| 47 | 6.11E−79 | 1.32E−73 | 5.43E−98 | 2.20E−97 |
| 48 | 1.16E−77 | 7.87E−68 | 1.31E−67 | 3.92E−67 |
| 49 | 5.08E−59 | 3.55E−74 | 3.25E−71 | 5.25E−71 |
| 50 | 4.13E−78 | 4.35E−52 | 2.56E−53 | 1.24E−51 |

TABLE 23g
Data for Staphylococcus, particularly S. aureus (continued)

| No. | Imipenem_pv_adj | Levofloxacin_pv_adj | Moxifloxacin_pv_adj | Oxacillin_pv_adj |
|---|---|---|---|---|
| 1 | 2.22E−97 | 8.36E−31 | 1.85E−167 | 9.38E−227 |
| 2 | 2.22E−97 | 8.36E−31 | 1.85E−167 | 9.38E−227 |
| 3 | 2.22E−97 | 8.36E−31 | 1.24E−168 | 2.67E−225 |
| 4 | 5.09E−91 | 5.82E−30 | 1.90E−168 | 1.77E−211 |
| 5 | 2.50E−88 | 1.50E−28 | 3.37E−166 | 3.22E−210 |
| 6 | 1.02E−75 | 5.49E−34 | 4.29E−188 | 2.96E−187 |
| 7 | 5.60E−79 | 1.02E−27 | 1.24E−168 | 6.72E−181 |
| 8 | 5.60E−79 | 1.02E−27 | 8.38E−166 | 6.72E−181 |
| 9 | 5.60E−79 | 1.02E−27 | 1.24E−168 | 6.72E−181 |
| 10 | 5.60E−79 | 1.02E−27 | 9.67E−167 | 8.54E−179 |
| 11 | 7.66E−78 | 1.02E−27 | 6.64E−164 | 8.54E−179 |
| 12 | 5.60E−79 | 5.41E−27 | 4.22E−160 | 1.82E−175 |
| 13 | 1.11E−77 | 1.82E−28 | 7.77E−170 | 3.23E−175 |
| 14 | 5.16E−79 | 1.02E−27 | 1.02E−172 | 9.13E−175 |
| 15 | 5.16E−79 | 1.02E−27 | 1.02E−172 | 9.13E−175 |
| 16 | 5.16E−79 | 1.02E−27 | 1.02E−172 | 9.13E−175 |
| 17 | 5.16E−79 | 1.02E−27 | 1.02E−172 | 9.13E−175 |
| 18 | 1.11E−77 | 4.43E−26 | 5.10E−171 | 2.26E−173 |
| 19 | 1.11E−77 | 4.43E−26 | 4.94E−170 | 2.40E−172 |
| 20 | 2.49E−65 | 7.88E−28 | 2.60E−167 | 1.43E−155 |
| 21 | 7.09E−65 | 7.88E−28 | 3.13E−166 | 2.33E−153 |
| 22 | 1.38E−64 | 8.83E−27 | 3.37E−166 | 1.17E−154 |
| 23 | 1.38E−64 | 8.83E−27 | 3.37E−166 | 1.17E−154 |
| 24 | 6.20E−63 | 2.26E−24 | 7.17E−161 | 3.62E−151 |
| 25 | 1.34E−61 | 1.22E−26 | 4.17E−152 | 4.81E−142 |
| 26 | 6.28E−51 | 3.77E−23 | 1.59E−135 | 2.07E−120 |
| 27 | 6.51E−51 | 2.53E−22 | 1.70E−135 | 8.40E−122 |
| 28 | 6.51E−51 | 2.53E−22 | 1.78E−134 | 8.52E−120 |
| 29 | 5.53E−51 | 1.45E−21 | 4.06E−133 | 1.84E−119 |
| 30 | 8.78E−49 | 9.16E−21 | 1.01E−130 | 3.53E−117 |
| 31 | 8.13E−44 | 1.25E−24 | 4.84E−126 | 3.22E−102 |
| 32 | 2.98E−44 | 2.87E−19 | 6.20E−122 | 5.33E−111 |
| 33 | 6.56E−47 | 5.69E−23 | 5.76E−120 | 7.13E−108 |
| 34 | 4.99E−46 | 2.00E−18 | 1.85E−116 | 2.91E−105 |
| 35 | 1.79E−38 | 1.08E−20 | 7.19E−116 | 1.17E−92 |
| 36 | 4.65E−43 | 6.88E−21 | 4.22E−113 | 2.39E−97 |
| 37 | 4.65E−43 | 6.88E−21 | 4.22E−113 | 2.39E−97 |
| 38 | 1.60E−42 | 7.01E−24 | 4.84E−112 | 7.55E−91 |
| 39 | 1.54E−44 | 3.19E−20 | 4.64E−110 | 2.85E−100 |
| 40 | 4.20E−36 | 3.14E−19 | 5.76E−108 | 5.09E−88 |
| 41 | 1.65E−39 | 8.87E−19 | 2.41E−107 | 6.05E−97 |
| 42 | 8.79E−40 | 1.09E−14 | 3.00E−106 | 3.22E−94 |
| 43 | 1.21E−43 | 1.71E−19 | 1.58E−102 | 1.41E−92 |
| 44 | 2.98E−44 | 8.40E−19 | 1.07E−101 | 4.03E−92 |
| 45 | 8.13E−44 | 8.40E−19 | 1.07E−101 | 4.03E−92 |
| 46 | 2.94E−31 | 2.14E−17 | 5.26E−101 | 5.94E−79 |
| 47 | 1.67E−43 | 1.76E−21 | 8.02E−101 | 1.17E−94 |
| 48 | 2.19E−35 | 1.61E−13 | 1.79E−95 | 4.56E−88 |
| 49 | 4.69E−30 | 2.14E−17 | 1.80E−94 | 5.69E−74 |
| 50 | 3.32E−41 | 8.45E−15 | 1.32E−71 | 2.83E−94 |

TABLE 23h
Data for Staphylococcus, particularly S. aureus (continued)

| | Penicillin | | | |
|---|---|---|---|---|
| No. | G_pv_adj | Piperacillin/Tazobactam_pv_adj | Tetracyclin_pv_adj | Tobramycin_pv_adj |
| 1 | 1.37E−41 | 1.55E−21 | 1.22E−01 | 2.16E−15 |
| 2 | 1.37E−41 | 1.55E−21 | 1.22E−01 | 2.16E−15 |
| 3 | 1.51E−41 | 1.55E−21 | 9.63E−02 | 2.16E−15 |
| 4 | 3.46E−40 | 1.17E−19 | 2.75E−02 | 6.21E−16 |
| 5 | 6.83E−41 | 2.25E−18 | 3.70E−02 | 2.16E−15 |
| 6 | 3.80E−41 | 1.59E−17 | 1.27E−02 | 1.94E−13 |
| 7 | 6.95E−35 | 3.69E−14 | 5.90E−03 | 7.81E−15 |
| 8 | 6.95E−35 | 3.69E−14 | 5.90E−03 | 7.81E−15 |
| 9 | 6.95E−35 | 3.69E−14 | 5.90E−03 | 7.81E−15 |
| 10 | 1.50E−34 | 3.69E−14 | 8.03E−03 | 7.81E−15 |
| 11 | 1.50E−34 | 3.69E−14 | 8.03E−03 | 7.81E−15 |
| 12 | 5.97E−34 | 3.69E−14 | 8.79E−03 | 7.81E−15 |
| 13 | 5.30E−34 | 5.46E−13 | 9.97E−04 | 9.71E−16 |
| 14 | 1.23E−34 | 3.69E−14 | 1.42E−03 | 7.81E−15 |
| 15 | 1.23E−34 | 3.69E−14 | 1.42E−03 | 7.81E−15 |
| 16 | 1.23E−34 | 3.69E−14 | 1.42E−03 | 7.81E−15 |
| 17 | 1.23E−34 | 3.69E−14 | 1.42E−03 | 7.81E−15 |
| 18 | 1.23E−34 | 5.46E−13 | 1.42E−03 | 3.02E−14 |
| 19 | 1.23E−34 | 5.46E−13 | 1.42E−03 | 3.02E−14 |
| 20 | 5.10E−21 | 3.04E−11 | 5.98E−04 | 7.15E−15 |
| 21 | 9.90E−21 | 3.04E−11 | 2.52E−04 | 7.15E−15 |
| 22 | 2.82E−20 | 9.29E−11 | 5.97E−04 | 2.24E−14 |
| 23 | 2.82E−20 | 9.29E−11 | 5.97E−04 | 2.24E−14 |
| 24 | 1.92E−20 | 4.28E−09 | 8.65E−04 | 4.98E−13 |
| 25 | 1.42E−21 | 6.78E−10 | 2.40E−03 | 6.71E−15 |
| 26 | 2.07E−10 | 4.04E−10 | 5.35E−05 | 4.17E−12 |
| 27 | 1.36E−10 | 1.16E−09 | 2.27E−05 | 1.33E−11 |
| 28 | 2.18E−10 | 1.16E−09 | 3.46E−05 | 1.33E−11 |
| 29 | 4.59E−14 | 1.16E−09 | 8.29E−05 | 7.56E−11 |
| 30 | 6.54E−10 | 2.97E−08 | 3.46E−05 | 2.92E−10 |
| 31 | 4.06E−09 | 7.73E−08 | 2.02E−05 | 2.25E−08 |
| 32 | 2.64E−11 | 3.31E−11 | 2.07E−02 | 6.23E−11 |
| 33 | 2.28E−19 | 2.60E−08 | 2.52E−06 | 9.88E−10 |
| 34 | 1.20E−07 | 3.78E−10 | 1.24E−02 | 9.10E−11 |
| 35 | 4.14E−07 | 1.59E−06 | 1.78E−06 | 6.53E−07 |
| 36 | 4.05E−13 | 7.74E−09 | 1.25E−04 | 1.01E−10 |
| 37 | 4.05E−13 | 7.74E−09 | 1.25E−04 | 1.01E−10 |
| 38 | 4.22E−06 | 1.49E−07 | 1.46E−05 | 5.29E−08 |
| 39 | 1.18E−06 | 8.70E−08 | 2.19E−04 | 7.09E−11 |
| 40 | 1.87E−06 | 1.59E−06 | 3.63E−05 | 1.92E−07 |
| 41 | 4.31E−06 | 6.90E−07 | 1.08E−04 | 2.74E−09 |
| 42 | 6.34E−11 | 4.80E−05 | 2.10E−05 | 6.87E−09 |
| 43 | 2.66E−09 | 4.09E−08 | 4.92E−04 | 1.94E−10 |
| 44 | 7.22E−09 | 8.70E−08 | 3.32E−04 | 6.07E−10 |
| 45 | 2.79E−09 | 8.70E−08 | 3.32E−04 | 6.07E−10 |
| 46 | 1.54E−26 | 8.34E−08 | 2.05E−05 | 1.24E−11 |
| 47 | 4.32E−03 | 1.16E−09 | 4.05E−06 | 1.33E−11 |
| 48 | 1.28E−06 | 1.86E−05 | 1.61E−03 | 1.89E−08 |
| 49 | 3.43E−27 | 8.34E−08 | 1.11E−03 | 1.24E−11 |
| 50 | 2.12E−15 | 1.05E−10 | 6.95E−03 | 1.62E−07 |

TABLE 23i
Data for Staphylococcus, particularly S. aureus (continued)

| No. | Locus.Tag | Gene.Symbol | GenBank.Accession | Chromosome |
|---|---|---|---|---|
| 1 | HMPREF0791_1752 | mecA | ZP_04797671 | |
| 2 | HMPREF0794_1488 | ugpQ | ZP_06614206 | |
| 3 | HMPREF0794_1485 | mecR | ZP_06614203 | |
| 4 | SIAG_00762 | | ZP_06819251 | |
| 5 | HMPREF0789_1682 | | ZP_04825874 | |
| 6 | SAMG_01950 | | ZP_05682863 | |
| 7 | Missing locus_tag: FN433596.cds78.83191..82796 | | CBI47961 | |
| 8 | SATW20_00761 | | CBI67631 | |
| 9 | SERP2515 | | YP_190057 | |
| 10 | SAIG_02579 | | ZP_05694555 | |
| 11 | SERP2519 | mecI | YP_190060 | |
| 12 | SERP2505 | | YP_190047 | |
| 13 | HMPREF0794_1451 | | ZP_06614169 | |
| 14 | SERP2490 | kdeP | YP_190033 | |
| 15 | SERP2487 | kdpA | YP_190030 | |
| 16 | SERP2485 | kdpC | YP_190028 | |
| 17 | SERP2489 | kdpD | YP_190032 | |
| 18 | SERP2486 | kdpB | YP_190029 | |
| 19 | SAIG_01884 | | ZP_05693385 | |
| 20 | SERP1347 | tnpA-2 | YP_188919 | |
| 21 | SERP1223 | tnpB-1 | YP_188797 | |
| 22 | SLAG_02844 | | ZP_06930609 | |
| 23 | SA0049 | ant(9) | NP_373289 | |
| 24 | SERP1342 | | YP_188914 | |
| 25 | HMPREF0773_2426 | radC | ZP_04829125 | |
| 26 | SAFG_01021 | | ZP_05703394 | |
| 27 | SAFG_01015 | | ZP_05703388 | |
| 28 | SA2981_2149 | | ADC38360 | |
| 29 | ECTR2_1640 | | CBX35020 | |
| 30 | SA2981_1770 | | ADC37981 | |
| 31 | SAB0169 | | YP_415679 | |
| 32 | SaurJH1_0467 | | YP_001315613 | |
| 33 | SERP1345 | tnpC-2 | YP_188917 | |
| 34 | SGAG_02626 | | ZP_06303506 | |
| 35 | ECTR2_2075 | | CBX35404 | |
| 36 | HMPREF0774_2643 | | ZP_04869332 | |
| 37 | SAHG_01730 | | ZP_05696261 | |
| 38 | SAA6159_00204 | coa | ADL22160 | |
| 39 | SARG_01832 | | ZP_06332611 | |
| 40 | SAIG_01373 | | ZP_05693621 | |
| 41 | SANG_00111 | | ZP_05682471 | |
| 42 | SAHG_02693 | | ZP_05696106 | |
| 43 | SAJG_00740 | | ZP_05692517 | |
| 44 | SaurJH1_0188 | | YP_001315337 | |
| 45 | SGAG_00714 | | ZP_06301594 | |
| 46 | ECTR2_2580 | | CBX35910 | plasmid |
| | | | | pLUH02 |
| 47 | SA2981_0414 | lpl3 | ADC36625 | |
| 48 | SA2981_1977 | agrB | ADC38188 | |
| 49 | SMAG_02765 | | ZP_06817387 | |
| 50 | HMPREF0798_02109 | | ZP_07844597 | |

TABLE 23j
Data for Staphylococcus, particularly S. aureus (continued)

| No. | Start.Coord | End.Coord | Strand | Scaffold.ID |
|---|---|---|---|---|
| 1 | 1335 | 3341 | + | 645076738 |
| 2 | 7348 | 8091 | − | 647019109 |
| 3 | 3685 | 4599 | − | 647019109 |
| 4 | 3987 | 5336 | − | 647537018 |
| 5 | 1842 | 3491 | − | 645076234 |
| 6 | 89170 | 89277 | − | 645958292 |
| 7 | 82796 | 84130 | − | 646862418 |
| 8 | 81146 | 81214 | − | 646862418 |
| 9 | 2570266 | 2571330 | + | 637000098 |
| 10 | 6265 | 7374 | + | 645958144 |
| 11 | 2574428 | 2574799 | − | 637000098 |
| 12 | 2562107 | 2562424 | + | 637000098 |
| 13 | 8938 | 9252 | + | 647019108 |
| 14 | 2549489 | 2550184 | + | 637000098 |
| 15 | 2544901 | 2546577 | − | 637000098 |
| 16 | 2542288 | 2542845 | − | 637000098 |
| 17 | 2546845 | 2549514 | + | 637000098 |
| 18 | 2542861 | 2544882 | − | 637000098 |
| 19 | 76580 | 76657 | − | 645958116 |
| 20 | 1403752 | 1404837 | − | 637000098 |
| 21 | 1255425 | 1257317 | − | 637000098 |
| 22 | 4557 | 5288 | − | 647016972 |
| 23 | 56859 | 57641 | − | 637000072 |
| 24 | 1399547 | 1399606 | + | 637000098 |
| 25 | 4478 | 5164 | − | 645076413 |
| 26 | 277066 | 278082 | + | 645957989 |
| 27 | 272112 | 272231 | − | 645957989 |
| 28 | 2299803 | 2300126 | − | 646862390 |
| 29 | 1804139 | 1805368 | − | 651053129 |
| 30 | 1899111 | 1899692 | + | 646862390 |
| 31 | 209129 | 211012 | + | 637000460 |
| 32 | 487880 | 489091 | + | 640753011 |
| 33 | 1401479 | 1401856 | − | 637000098 |
| 34 | 245 | 686 | − | 647008393 |
| 35 | 2210164 | 2210319 | − | 651053129 |
| 36 | 16441 | 17124 | + | 645076159 |
| 37 | 85620 | 86303 | + | 645958072 |
| 38 | 242193 | 244169 | + | 648231718 |
| 39 | 177946 | 180372 | + | 647535981 |
| 40 | 38140 | 39216 | + | 645958123 |
| 41 | 77988 | 79490 | − | 645958383 |
| 42 | 5009 | 5929 | − | 645958068 |
| 43 | 78131 | 78853 | + | 645958189 |
| 44 | 221049 | 221729 | + | 640753011 |
| 45 | 44419 | 44616 | + | 647008364 |
| 46 | 12682 | 13458 | − | 651053131 |
| 47 | 456367 | 457155 | + | 646862390 |
| 48 | 2096829 | 2097392 | + | 646862390 |
| 49 | 14918 | 15697 | − | 647017059 |
| 50 | 54037 | 54601 | + | 651285048 |

TABLE 24a
Data for Staphylococcus, particularly S. aureus

| No. | Scaffold.External.Accession | Scaffold.Name | best_pv |
|---|---|---|---|
| 1 | NZ_ACJC01000132 | Staphylococcus epidermidis W23144: NZ_ACJC01000132 | 9.38479881072327e−227 |
| 2 | NZ_ADMU01000036 | Staphylococcus epidermidis M23864: W2 (grey) contig00037: | 9.38479881072327e−227 |
| | | NZ_ADMU01000036 | |
| 3 | NZ_ADMU01000036 | Staphylococcus epidermidis M23864: W2 (grey) contig00037: | 2.67435403500704e−225 |
| | | NZ_ADMU01000036 | |
| 4 | NZ_GG770515 | Staphylococcus aureus subsp. aureus EMRSA16 genomic scaffold | 1.77186061517335e−211 |
| | | supercont1.3: NZ_GG770515 | |
| 5 | NZ_ACHE01000064 | Staphylococcus epidermidis BCM-HMP0060: NZ_ACHE01000064 | 3.22333061264623e−210 |
| 6 | NZ_ACKJ01000008 | Staphylococcus aureus A9719: NZ_ACKJ01000008 | 4.28801157250818e−188 |
| 7 | FN433596 | Staphylococcus aureus subsp. aureus TW20: FN433596 | 6.72085159673615e−181 |
| 8 | FN433596 | Staphylococcus aureus subsp. aureus TW20: FN433596 | 6.72085159673615e−181 |
| 9 | NC_002976 | Staphylococcus epidermidis RP62A: NC_002976 | 6.72085159673615e−181 |
| 10 | NZ_ACKF01000035 | Staphylococcus aureus A6300: NZ_ACKF01000035 | 8.5426103876016e−179 |
| 11 | NC_002976 | Staphylococcus epidermidis RP62A: NC_002976 | 8.5426103876016e−179 |
| 12 | NC_002976 | Staphylococcus epidermidis RP62A: NC_002976 | 1.81714784068785e−175 |
| 13 | NZ_ADMU01000035 | Staphylococcus epidermidis M23864: W2 (grey) contig00036: | 3.23410033711171e−175 |
| | | NZ_ADMU01000035 | |
| 14 | NC_002976 | Staphylococcus epidermidis RP62A: NC_002976 | 9.12700235375297e−175 |
| 15 | NC_002976 | Staphylococcus epidermidis RP62A: NC_002976 | 9.12700235375297e−175 |
| 16 | NC_002976 | Staphylococcus epidermidis RP62A: NC_002976 | 9.12700235375297e−175 |
| 17 | NC_002976 | Staphylococcus epidermidis RP62A: NC_002976 | 9.12700235375297e−175 |
| 18 | NC_002976 | Staphylococcus epidermidis RP62A: NC_002976 | 2.25944344923286e−173 |
| 19 | NZ_ACKF01000007 | Staphylococcus aureus A6300: NZ_ACKF01000007 | 2.40063417489507e−172 |
| 20 | NC_002976 | Staphylococcus epidermidis RP62A: NC_002976 | 2.59802993040457e−167 |
| 21 | NC_002976 | Staphylococcus epidermidis RP62A: NC_002976 | 3.12953724144125e−166 |
| 22 | NZ_ADJJ01000031 | Staphylococcus aureus A8796 cont1.31: NZ_ADJJ01000031 | 3.37208086862656e−166 |
| 23 | NC_002745 | Staphylococcus aureus subsp. aureus N315: NC_002745 | 3.37208086862656e−166 |
| 24 | NC_002976 | Staphylococcus epidermidis RP62A: NC_002976 | 7.17319474297637e−161 |
| 25 | NZ_ACHH01000128 | Staphylococcus aureus subsp. aureus TCH70: NZ_ACHH01000128 | 4.16856451727179e−152 |
| 26 | NZ_ACKC01000026 | Staphylococcus aureus A5937: NZ_ACKC01000026 | 1.58751373713434e−135 |
| 27 | NZ_ACKC01000026 | Staphylococcus aureus A5937: NZ_ACKC01000026 | 1.69633422486642e−135 |
| 28 | CP001844 | Staphylococcus aureus 04-02981: CP001844 | 1.77656315889944e−134 |
| 29 | FR714927 | Staphylococcus aureus subsp. aureus ECT-R 2: FR714927 | 4.06264970457926e−133 |
| 30 | CP001844 | Staphylococcus aureus 04-02981: CP001844 | 1.01251954267327e−130 |
| 31 | NC_007622 | Staphylococcus aureus RF122: NC_007622 | 4.84169534955158e−126 |
| 32 | NC_009632 | Staphylococcus aureus subsp. aureus JH1: NC_009632 | 6.20485118760467e−122 |
| 33 | NC_002976 | Staphylococcus epidermidis RP62A: NC_002976 | 5.75915090813908e−120 |
| 34 | NZ_ACYO01000032 | Staphylococcus aureus A8117 cont1.32: NZ_ACYO01000032 | 1.84672228386398e−116 |
| 35 | FR714927 | Staphylococcus aureus subsp. aureus ECT-R 2: FR714927 | 7.1946440374743e−116 |
| 36 | NZ_ACHD01000273 | Staphylococcus aureus subsp. aureus TCH130: NZ_ACHD01000273 | 4.22320321058421e−113 |
| 37 | NZ_ACKE01000012 | Staphylococcus aureus A6224: NZ_ACKE01000012 | 4.22320321058421e−113 |
| 38 | CP002114 | Staphylococcus aureus subsp. aureus JKD6159: CP002114 | 4.83609713640718e−112 |
| 39 | NZ_GG730131 | Staphylococcus aureus subsp. aureus C101 genomic scaffold | 4.63942446669448e−110 |
| | | supercont1.12: NZ_GG730131 | |
| 40 | NZ_ACKF01000014 | Staphylococcus aureus A6300: NZ_ACKF01000014 | 5.76090691723747e−108 |
| 41 | NZ_ACKK01000039 | Staphylococcus aureus A9763: NZ_ACKK01000039 | 2.40583396327414e−107 |
| 42 | NZ_ACKE01000008 | Staphylococcus aureus A6224: NZ_ACKE01000008 | 2.99974766558167e−106 |
| 43 | NZ_ACKG01000031 | Staphylococcus aureus A8115: NZ_ACKG01000031 | 1.57559858677166e−102 |
| 44 | NC_009632 | Staphylococcus aureus subsp. aureus JH1: NC_009632 | 1.0725409335823e−101 |
| 45 | NZ_ACYO01000003 | Staphylococcus aureus A8117 cont1.3: NZ_ACYO01000003 | 1.0725409335823e−101 |
| 46 | FR714929 | Staphylococcus aureus subsp. aureus ECT-R 2 plasmid pLUH02: | 5.26123840198017e−101 |
| | | FR714929 | |
| 47 | CP001844 | Staphylococcus aureus 04-02981: CP001844 | 8.01600909282956e−101 |
| 48 | CP001844 | Staphylococcus aureus 04-02981: CP001844 | 1.78546333248495e−95 |
| 49 | NZ_ADJK01000020 | Staphylococcus aureus A8819 cont1.20: NZ_ADJK01000020 | 1.80469278143707e−94 |
| 50 | NZ_GL545262 | Staphylococcus hominis subsp. hominis C80 genomic scaffold | 2.82728623419544e−94 |
| | | supercont1.11: NZ_GL545262 | |

TABLE 24b
Data for Staphylococcus, particularly S. aureus (continued)

| No. | sign_phenos |
|---|---|
| 1 | Ampicillin; Ampicillin/Sulbactam; Cefepim; Cefotaxim; Cefuroxim; Ciprofloxacin; Clindamycin; Erythromycin; Imipenem; |
| | Levofloxacin; Moxifloxacin; Oxacillin; Penicillin G; Piperacillin/Tazobactam; Tobramycin |
| 2 | Ampicillin; Ampicillin/Sulbactam; Cefepim; Cefotaxim; Cefuroxim; Ciprofloxacin; Clindamycin; Erythromycin; Imipenem; |
| | Levofloxacin; Moxifloxacin; Oxacillin; Penicillin G; Piperacillin/Tazobactam; Tobramycin |
| 3 | Ampicillin; Ampicillin/Sulbactam; Cefepim; Cefotaxim; Cefuroxim; Ciprofloxacin; Clindamycin; Erythromycin; Imipenem; |
| | Levofloxacin; Moxifloxacin; Oxacillin; Penicillin G; Piperacillin/Tazobactam; Tobramycin |
| 4 | Ampicillin; Ampicillin/Sulbactam; Cefepim; Cefotaxim; Cefuroxim; Ciprofloxacin; Clindamycin; Erythromycin; Imipenem; |
| | Levofloxacin; Moxifloxacin; Oxacillin; Penicillin G; Piperacillin/Tazobactam; Tobramycin |
| 5 | Ampicillin; Ampicillin/Sulbactam; Cefepim; Cefotaxim; Cefuroxim; Ciprofloxacin; Clindamycin; Erythromycin; Imipenem; |
| | Levofloxacin; Moxifloxacin; Oxacillin; Penicillin G; Piperacillin/Tazobactam; Tobramycin |
| 6 | Ampicillin; Ampicillin/Sulbactam; Cefepim; Cefotaxim; Cefuroxim; Ciprofloxacin; Clindamycin; Erythromycin; Imipenem; |
| | Levofloxacin; Moxifloxacin; Oxacillin; Penicillin G; Piperacillin/Tazobactam; Tobramycin |
| 7 | Ampicillin; Ampicillin/Sulbactam; Cefepim; Cefotaxim; Cefuroxim; Ciprofloxacin; Clindamycin; Erythromycin; Imipenem; |
| | Levofloxacin; Moxifloxacin; Oxacillin; Penicillin G; Piperacillin/Tazobactam; Tetracyclin; Tobramycin |
| 8 | Ampicillin; Ampicillin/Sulbactam; Cefepim; Cefotaxim; Cefuroxim; Ciprofloxacin; Clindamycin; Erythromycin; Imipenem; |
| | Levofloxacin; Moxifloxacin; Oxacillin; Penicillin G; Piperacillin/Tazobactam; Tetracyclin; Tobramycin |
| 9 | Ampicillin; Ampicillin/Sulbactam; Cefepim; Cefotaxim; Cefuroxim; Ciprofloxacin; Clindamycin; Erythromycin; Imipenem; |
| | Levofloxacin; Moxifloxacin; Oxacillin; Penicillin G; Piperacillin/Tazobactam; Tetracyclin; Tobramycin |
| 10 | Ampicillin; Ampicillin/Sulbactam; Cefepim; Cefotaxim; Cefuroxim; Ciprofloxacin; Clindamycin; Erythromycin; Imipenem; |
| | Levofloxacin; Moxifloxacin; Oxacillin; Penicillin G; Piperacillin/Tazobactam; Tetracyclin; Tobramycin |
| 11 | Ampicillin; Ampicillin/Sulbactam; Cefepim; Cefotaxim; Cefuroxim; Ciprofloxacin; Clindamycin; Erythromycin; Imipenem; |
| | Levofloxacin; Moxifloxacin; Oxacillin; Penicillin G; Piperacillin/Tazobactam; Tetracyclin; Tobramycin |
| 12 | Ampicillin; Ampicillin/Sulbactam; Cefepim; Cefotaxim; Cefuroxim; Ciprofloxacin; Clindamycin; Erythromycin; Imipenem; |
| | Levofloxacin; Moxifloxacin; Oxacillin; Penicillin G; Piperacillin/Tazobactam; Tetracyclin; Tobramycin |
| 13 | Ampicillin; Ampicillin/Sulbactam; Cefepim; Cefotaxim; Cefuroxim; Ciprofloxacin; Clindamycin; Erythromycin; Imipenem; |
| | Levofloxacin; Moxifloxacin; Oxacillin; Penicillin G; Piperacillin/Tazobactam; Tetracyclin; Tobramycin |
| 14 | Ampicillin; Ampicillin/Sulbactam; Cefepim; Cefotaxim; Cefuroxim; Ciprofloxacin; Clindamycin; Erythromycin; Imipenem; |
| | Levofloxacin; Moxifloxacin; Oxacillin; Penicillin G; Piperacillin/Tazobactam; Tetracyclin; Tobramycin |
| 15 | Ampicillin; Ampicillin/Sulbactam; Cefepim; Cefotaxim; Cefuroxim; Ciprofloxacin; Clindamycin; Erythromycin; Imipenem; |
| | Levofloxacin; Moxifloxacin; Oxacillin; Penicillin G; Piperacillin/Tazobactam; Tetracyclin; Tobramycin |
| 16 | Ampicillin; Ampicillin/Sulbactam; Cefepim; Cefotaxim; Cefuroxim; Ciprofloxacin; Clindamycin; Erythromycin; Imipenem; |
| | Levofloxacin; Moxifloxacin; Oxacillin; Penicillin G; Piperacillin/Tazobactam; Tetracyclin; Tobramycin |
| 17 | Ampicillin; Ampicillin/Sulbactam; Cefepim; Cefotaxim; Cefuroxim; Ciprofloxacin; Clindamycin; Erythromycin; Imipenem; |
| | Levofloxacin; Moxifloxacin; Oxacillin; Penicillin G; Piperacillin/Tazobactam; Tetracyclin; Tobramycin |
| 18 | Ampicillin; Ampicillin/Sulbactam; Cefepim; Cefotaxim; Cefuroxim; Ciprofloxacin; Clindamycin; Erythromycin; Imipenem; |
| | Levofloxacin; Moxifloxacin; Oxacillin; Penicillin G; Piperacillin/Tazobactam; Tetracyclin; Tobramycin |
| 19 | Ampicillin; Ampicillin/Sulbactam; Cefepim; Cefotaxim; Cefuroxim; Ciprofloxacin; Clindamycin; Erythromycin; Imipenem; |
| | Levofloxacin; Moxifloxacin; Oxacillin; Penicillin G; Piperacillin/Tazobactam; Tetracyclin; Tobramycin |
| 20 | Ampicillin; Ampicillin/Sulbactam; Cefepim; Cefotaxim; Cefuroxim; Ciprofloxacin; Clindamycin; Erythromycin; Imipenem; |
| | Levofloxacin; Moxifloxacin; Oxacillin; Penicillin G; Piperacillin/Tazobactam; Tetracyclin; Tobramycin |
| 21 | Ampicillin; Ampicillin/Sulbactam; Cefepim; Cefotaxim; Cefuroxim; Ciprofloxacin; Clindamycin; Erythromycin; Imipenem; |
| | Levofloxacin; Moxifloxacin; Oxacillin; Penicillin G; Piperacillin/Tazobactam; Tetracyclin; Tobramycin |
| 22 | Ampicillin; Ampicillin/Sulbactam; Cefepim; Cefotaxim; Cefuroxim; Ciprofloxacin; Clindamycin; Erythromycin; Imipenem; |
| | Levofloxacin; Moxifloxacin; Oxacillin; Penicillin G; Piperacillin/Tazobactam; Tetracyclin; Tobramycin |
| 23 | Ampicillin; Ampicillin/Sulbactam; Cefepim; Cefotaxim; Cefuroxim; Ciprofloxacin; Clindamycin; Erythromycin; Imipenem; |
| | Levofloxacin; Moxifloxacin; Oxacillin; Penicillin G; Piperacillin/Tazobactam; Tetracyclin; Tobramycin |
| 24 | Ampicillin; Ampicillin/Sulbactam; Cefepim; Cefotaxim; Cefuroxim; Ciprofloxacin; Clindamycin; Erythromycin; Imipenem; |
| | Levofloxacin; Moxifloxacin; Oxacillin; Penicillin G; Piperacillin/Tazobactam; Tetracyclin; Tobramycin |
| 25 | Ampicillin; Ampicillin/Sulbactam; Cefepim; Cefotaxim; Cefuroxim; Ciprofloxacin; Clindamycin; Erythromycin; Imipenem; |
| | Levofloxacin; Moxifloxacin; Oxacillin; Penicillin G; Piperacillin/Tazobactam; Tetracyclin; Tobramycin |
| 26 | Ampicillin/Sulbactam; Cefepim; Cefotaxim; Cefuroxim; Ciprofloxacin; Clindamycin; Erythromycin; Imipenem; Levofloxacin; |
| | Moxifloxacin; Oxacillin; Penicillin G; Piperacillin/Tazobactam; Tetracyclin; Tobramycin |
| 27 | Ampicillin/Sulbactam; Cefepim; Cefotaxim; Cefuroxim; Ciprofloxacin; Clindamycin; Erythromycin; Imipenem; Levofloxacin; |
| | Moxifloxacin; Oxacillin; Penicillin G; Piperacillin/Tazobactam; Tetracyclin; Tobramycin |
| 28 | Ampicillin/Sulbactam; Cefepim; Cefotaxim; Cefuroxim; Ciprofloxacin; Clindamycin; Erythromycin; Imipenem; Levofloxacin; |
| | Moxifloxacin; Oxacillin; Penicillin G; Piperacillin/Tazobactam; Tetracyclin; Tobramycin |
| 29 | Ampicillin/Sulbactam; Cefepim; Cefotaxim; Cefuroxim; Ciprofloxacin; Clindamycin; Erythromycin; Imipenem; Levofloxacin; |
| | Moxifloxacin; Oxacillin; Penicillin G; Piperacillin/Tazobactam; Tetracyclin; Tobramycin |
| 30 | Ampicillin/Sulbactam; Cefepim; Cefotaxim; Cefuroxim; Ciprofloxacin; Clindamycin; Erythromycin; Imipenem; Levofloxacin; |
| | Moxifloxacin; Oxacillin; Penicillin G; Piperacillin/Tazobactam; Tetracyclin; Tobramycin |
| 31 | Ampicillin; Ampicillin/Sulbactam; Cefepim; Cefotaxim; Cefuroxim; Ciprofloxacin; Clindamycin; Erythromycin; Imipenem; |
| | Levofloxacin; Moxifloxacin; Oxacillin; Penicillin G; Piperacillin/Tazobactam; Tetracyclin; Tobramycin |
| 32 | Ampicillin/Sulbactam; Cefepim; Cefotaxim; Cefuroxim; Ciprofloxacin; Clindamycin; Erythromycin; Imipenem; Levofloxacin; |
| | Moxifloxacin; Oxacillin; Penicillin G; Piperacillin/Tazobactam; Tobramycin |
| 33 | Ampicillin; Ampicillin/Sulbactam; Cefepim; Cefotaxim; Cefuroxim; Ciprofloxacin; Clindamycin; Erythromycin; Imipenem; |
| | Levofloxacin; Moxifloxacin; Oxacillin; Penicillin G; Piperacillin/Tazobactam; Tetracyclin; Tobramycin |
| 34 | Ampicillin/Sulbactam; Cefepim; Cefotaxim; Cefuroxim; Ciprofloxacin; Clindamycin; Erythromycin; Imipenem; Levofloxacin; |
| | Moxifloxacin; Oxacillin; Penicillin G; Piperacillin/Tazobactam; Tobramycin |
| 35 | Ampicillin/Sulbactam; Cefepim; Cefotaxim; Cefuroxim; Ciprofloxacin; Clindamycin; Erythromycin; Imipenem; Levofloxacin; |
| | Moxifloxacin; Oxacillin; Penicillin G; Piperacillin/Tazobactam; Tetracyclin; Tobramycin |
| 36 | Ampicillin; Ampicillin/Sulbactam; Cefepim; Cefotaxim; Cefuroxim; Ciprofloxacin; Clindamycin; Erythromycin; Imipenem; |
| | Levofloxacin; Moxifloxacin; Oxacillin; Penicillin G; Piperacillin/Tazobactam; Tetracyclin; Tobramycin |
| 37 | Ampicillin; Ampicillin/Sulbactam; Cefepim; Cefotaxim; Cefuroxim; Ciprofloxacin; Clindamycin; Erythromycin; Imipenem; |
| | Levofloxacin; Moxifloxacin; Oxacillin; Penicillin G; Piperacillin/Tazobactam; Tetracyclin; Tobramycin |
| 38 | Ampicillin/Sulbactam; Cefepim; Cefotaxim; Cefuroxim; Ciprofloxacin; Clindamycin; Erythromycin; Imipenem; Levofloxacin; |
| | Moxifloxacin; Oxacillin; Penicillin G; Piperacillin/Tazobactam; Tetracyclin; Tobramycin |
| 39 | Ampicillin/Sulbactam; Cefepim; Cefotaxim; Cefuroxim; Ciprofloxacin; Clindamycin; Erythromycin; Imipenem; Levofloxacin; |
| | Moxifloxacin; Oxacillin; Penicillin G; Piperacillin/Tazobactam; Tetracyclin; Tobramycin |
| 40 | Ampicillin/Sulbactam; Cefepim; Cefotaxim; Cefuroxim; Ciprofloxacin; Clindamycin; Erythromycin; Imipenem; Levofloxacin; |
| | Moxifloxacin; Oxacillin; Penicillin G; Piperacillin/Tazobactam; Tetracyclin; Tobramycin |
| 41 | Ampicillin/Sulbactam; Cefepim; Cefotaxim; Cefuroxim; Ciprofloxacin; Clindamycin; Erythromycin; Imipenem; Levofloxacin; |
| | Moxifloxacin; Oxacillin; Penicillin G; Piperacillin/Tazobactam; Tetracyclin; Tobramycin |
| 42 | Ampicillin/Sulbactam; Cefepim; Cefotaxim; Cefuroxim; Ciprofloxacin; Clindamycin; Erythromycin; Imipenem; Levofloxacin; |
| | Moxifloxacin; Oxacillin; Penicillin G; Piperacillin/Tazobactam; Tetracyclin; Tobramycin |
| 43 | Ampicillin/Sulbactam; Cefepim; Cefotaxim; Cefuroxim; Ciprofloxacin; Clindamycin; Erythromycin; Imipenem; Levofloxacin; |
| | Moxifloxacin; Oxacillin; Penicillin G; Piperacillin/Tazobactam; Tetracyclin; Tobramycin |
| 44 | Ampicillin/Sulbactam; Cefepim; Cefotaxim; Cefuroxim; Ciprofloxacin; Clindamycin; Erythromycin; Imipenem; Levofloxacin; |
| | Moxifloxacin; Oxacillin; Penicillin G; Piperacillin/Tazobactam; Tetracyclin; Tobramycin |
| 45 | Ampicillin/Sulbactam; Cefepim; Cefotaxim; Cefuroxim; Ciprofloxacin; Clindamycin; Erythromycin; Imipenem; Levofloxacin; |
| | Moxifloxacin; Oxacillin; Penicillin G; Piperacillin/Tazobactam; Tetracyclin; Tobramycin |
| 46 | Ampicillin; Ampicillin/Sulbactam; Cefepim; Cefotaxim; Cefuroxim; Ciprofloxacin; Clindamycin; Erythromycin; Imipenem; |
| | Levofloxacin; Moxifloxacin; Oxacillin; Penicillin G; Piperacillin/Tazobactam; Tetracyclin; Tobramycin |
| 47 | Ampicillin/Sulbactam; Cefepim; Cefotaxim; Cefuroxim; Ciprofloxacin; Clindamycin; Erythromycin; Imipenem; Levofloxacin; |
| | Moxifloxacin; Oxacillin; Penicillin G; Piperacillin/Tazobactam; Tetracyclin; Tobramycin |
| 48 | Ampicillin/Sulbactam; Cefepim; Cefotaxim; Cefuroxim; Ciprofloxacin; Clindamycin; Erythromycin; Imipenem; Levofloxacin; |
| | Moxifloxacin; Oxacillin; Penicillin G; Piperacillin/Tazobactam; Tetracyclin; Tobramycin |
| 49 | Ampicillin; Ampicillin/Sulbactam; Cefepim; Cefotaxim; Cefuroxim; Ciprofloxacin; Clindamycin; Erythromycin; Imipenem; |
| | Levofloxacin; Moxifloxacin; Oxacillin; Penicillin G; Piperacillin/Tazobactam; Tetracyclin; Tobramycin |
| 50 | Ampicillin; Ampicillin/Sulbactam; Cefepim; Cefotaxim; Cefuroxim; Ciprofloxacin; Clindamycin; Erythromycin; Imipenem; |
| | Levofloxacin; Moxifloxacin; Oxacillin; Penicillin G; Piperacillin/Tazobactam; Tetracyclin; Tobramycin |

TABLE 24c
Data for Staphylococcus, particularly S. aureus (continued)

| No. | sign_phenos_class | best_pheno | best_pheno_class |
|---|---|---|---|
| 1 | aminoglycoside; fluoroquinolone; lactam; lincosamide; macrolide | Oxacillin | lactam |
| 2 | aminoglycoside; fluoroquinolone; lactam; lincosamide; macrolide | Oxacillin | lactam |
| 3 | aminoglycoside; fluoroquinolone; lactam; lincosamide; macrolide | Oxacillin | lactam |
| 4 | aminoglycoside; fluoroquinolone; lactam; lincosamide; macrolide | Oxacillin | lactam |
| 5 | aminoglycoside; fluoroquinolone; lactam; lincosamide; macrolide | Oxacillin | lactam |
| 6 | aminoglycoside; fluoroquinolone; lactam; lincosamide; macrolide | Moxifloxacin | fluoroquinolone |
| 7 | aminoglycoside; fluoroquinolone; lactam; lincosamide; macrolide; tetracycline | Oxacillin | lactam |
| 8 | aminoglycoside; fluoroquinolone; lactam; lincosamide; macrolide; tetracycline | Oxacillin | lactam |
| 9 | aminoglycoside; fluoroquinolone; lactam; lincosamide; macrolide; tetracycline | Oxacillin | lactam |
| 10 | aminoglycoside; fluoroquinolone; lactam; lincosamide; macrolide; tetracycline | Oxacillin | lactam |
| 11 | aminoglycoside; fluoroquinolone; lactam; lincosamide; macrolide; tetracycline | Oxacillin | lactam |
| 12 | aminoglycoside; fluoroquinolone; lactam; lincosamide; macrolide; tetracycline | Oxacillin | lactam |
| 13 | aminoglycoside; fluoroquinolone; lactam; lincosamide; macrolide; tetracycline | Oxacillin | lactam |
| 14 | aminoglycoside; fluoroquinolone; lactam; lincosamide; macrolide; tetracycline | Oxacillin | lactam |
| 15 | aminoglycoside; fluoroquinolone; lactam; lincosamide; macrolide; tetracycline | Oxacillin | lactam |
| 16 | aminoglycoside; fluoroquinolone; lactam; lincosamide; macrolide; tetracycline | Oxacillin | lactam |
| 17 | aminoglycoside; fluoroquinolone; lactam; lincosamide; macrolide; tetracycline | Oxacillin | lactam |
| 18 | aminoglycoside; fluoroquinolone; lactam; lincosamide; macrolide; tetracycline | Oxacillin | lactam |
| 19 | aminoglycoside; fluoroquinolone; lactam; lincosamide; macrolide; tetracycline | Oxacillin | lactam |
| 20 | aminoglycoside; fluoroquinolone; lactam; lincosamide; macrolide; tetracycline | Moxifloxacin | fluoroquinolone |
| 21 | aminoglycoside; fluoroquinolone; lactam; lincosamide; macrolide; tetracycline | Moxifloxacin | fluoroquinolone |
| 22 | aminoglycoside; fluoroquinolone; lactam; lincosamide; macrolide; tetracycline | Moxifloxacin | fluoroquinolone |
| 23 | aminoglycoside; fluoroquinolone; lactam; lincosamide; macrolide; tetracycline | Moxifloxacin | fluoroquinolone |
| 24 | aminoglycoside; fluoroquinolone; lactam; lincosamide; macrolide; tetracycline | Moxifloxacin | fluoroquinolone |
| 25 | aminoglycoside; fluoroquinolone; lactam; lincosamide; macrolide; tetracycline | Moxifloxacin | fluoroquinolone |
| 26 | aminoglycoside; fluoroquinolone; lactam; lincosamide; macrolide; tetracycline | Moxifloxacin | fluoroquinolone |
| 27 | aminoglycoside; fluoroquinolone; lactam; lincosamide; macrolide; tetracycline | Moxifloxacin | fluoroquinolone |
| 28 | aminoglycoside; fluoroquinolone; lactam; lincosamide; macrolide; tetracycline | Moxifloxacin | fluoroquinolone |
| 29 | aminoglycoside; fluoroquinolone; lactam; lincosamide; macrolide; tetracycline | Moxifloxacin | fluoroquinolone |
| 30 | aminoglycoside; fluoroquinolone; lactam; lincosamide; macrolide; tetracycline | Moxifloxacin | fluoroquinolone |
| 31 | aminoglycoside; fluoroquinolone; lactam; lincosamide; macrolide; tetracycline | Moxifloxacin | fluoroquinolone |
| 32 | aminoglycoside; fluoroquinolone; lactam; lincosamide; macrolide | Moxifloxacin | fluoroquinolone |
| 33 | aminoglycoside; fluoroquinolone; lactam; lincosamide; macrolide; tetracycline | Moxifloxacin | fluoroquinolone |
| 34 | aminoglycoside; fluoroquinolone; lactam; lincosamide; macrolide | Moxifloxacin | fluoroquinolone |
| 35 | aminoglycoside; fluoroquinolone; lactam; lincosamide; macrolide; tetracycline | Moxifloxacin | fluoroquinolone |
| 36 | aminoglycoside; fluoroquinolone; lactam; lincosamide; macrolide; tetracycline | Moxifloxacin | fluoroquinolone |
| 37 | aminoglycoside; fluoroquinolone; lactam; lincosamide; macrolide; tetracycline | Moxifloxacin | fluoroquinolone |
| 38 | aminoglycoside; fluoroquinolone; lactam; lincosamide; macrolide; tetracycline | Moxifloxacin | fluoroquinolone |
| 39 | aminoglycoside; fluoroquinolone; lactam; lincosamide; macrolide; tetracycline | Moxifloxacin | fluoroquinolone |
| 40 | aminoglycoside; fluoroquinolone; lactam; lincosamide; macrolide; tetracycline | Moxifloxacin | fluoroquinolone |
| 41 | aminoglycoside; fluoroquinolone; lactam; lincosamide; macrolide; tetracycline | Moxifloxacin | fluoroquinolone |
| 42 | aminoglycoside; fluoroquinolone; lactam; lincosamide; macrolide; tetracycline | Moxifloxacin | fluoroquinolone |
| 43 | aminoglycoside; fluoroquinolone; lactam; lincosamide; macrolide; tetracycline | Moxifloxacin | fluoroquinolone |
| 44 | aminoglycoside; fluoroquinolone; lactam; lincosamide; macrolide; tetracycline | Moxifloxacin | fluoroquinolone |
| 45 | aminoglycoside; fluoroquinolone; lactam; lincosamide; macrolide; tetracycline | Moxifloxacin | fluoroquinolone |
| 46 | aminoglycoside; fluoroquinolone; lactam; lincosamide; macrolide; tetracycline | Moxifloxacin | fluoroquinolone |
| 47 | aminoglycoside; fluoroquinolone; lactam; lincosamide; macrolide; tetracycline | Moxifloxacin | fluoroquinolone |
| 48 | aminoglycoside; fluoroquinolone; lactam; lincosamide; macrolide; tetracycline | Moxifloxacin | fluoroquinolone |
| 49 | aminoglycoside; fluoroquinolone; lactam; lincosamide; macrolide; tetracycline | Moxifloxacin | fluoroquinolone |
| 50 | aminoglycoside; fluoroquinolone; lactam; lincosamide; macrolide; tetracycline | Oxacillin | lactam |

TABLE 24d
Data for Staphylococcus, particularly S. aureus (continued)

| No. | num_aminoglycoside | num_fluoroquinolone | num_lactam | num_lincosamide | num_macrolide | num_tetracycline |
|---|---|---|---|---|---|---|
| 1 | 1 | 3 | 9 | 1 | 1 | 0 |
| 2 | 1 | 3 | 9 | 1 | 1 | 0 |
| 3 | 1 | 3 | 9 | 1 | 1 | 0 |
| 4 | 1 | 3 | 9 | 1 | 1 | 0 |
| 5 | 1 | 3 | 9 | 1 | 1 | 0 |
| 6 | 1 | 3 | 9 | 1 | 1 | 0 |
| 7 | 1 | 3 | 9 | 1 | 1 | 1 |
| 8 | 1 | 3 | 9 | 1 | 1 | 1 |
| 9 | 1 | 3 | 9 | 1 | 1 | 1 |
| 10 | 1 | 3 | 9 | 1 | 1 | 1 |
| 11 | 1 | 3 | 9 | 1 | 1 | 1 |
| 12 | 1 | 3 | 9 | 1 | 1 | 1 |
| 13 | 1 | 3 | 9 | 1 | 1 | 1 |
| 14 | 1 | 3 | 9 | 1 | 1 | 1 |
| 15 | 1 | 3 | 9 | 1 | 1 | 1 |
| 16 | 1 | 3 | 9 | 1 | 1 | 1 |
| 17 | 1 | 3 | 9 | 1 | 1 | 1 |
| 18 | 1 | 3 | 9 | 1 | 1 | 1 |
| 19 | 1 | 3 | 9 | 1 | 1 | 1 |
| 20 | 1 | 3 | 9 | 1 | 1 | 1 |
| 21 | 1 | 3 | 9 | 1 | 1 | 1 |
| 22 | 1 | 3 | 9 | 1 | 1 | 1 |
| 23 | 1 | 3 | 9 | 1 | 1 | 1 |
| 24 | 1 | 3 | 9 | 1 | 1 | 1 |
| 25 | 1 | 3 | 9 | 1 | 1 | 1 |
| 26 | 1 | 3 | 8 | 1 | 1 | 1 |
| 27 | 1 | 3 | 8 | 1 | 1 | 1 |
| 28 | 1 | 3 | 8 | 1 | 1 | 1 |
| 29 | 1 | 3 | 8 | 1 | 1 | 1 |
| 30 | 1 | 3 | 8 | 1 | 1 | 1 |
| 31 | 1 | 3 | 9 | 1 | 1 | 1 |
| 32 | 1 | 3 | 8 | 1 | 1 | 0 |
| 33 | 1 | 3 | 9 | 1 | 1 | 1 |
| 34 | 1 | 3 | 8 | 1 | 1 | 0 |
| 35 | 1 | 3 | 8 | 1 | 1 | 1 |
| 36 | 1 | 3 | 9 | 1 | 1 | 1 |
| 37 | 1 | 3 | 9 | 1 | 1 | 1 |
| 38 | 1 | 3 | 8 | 1 | 1 | 1 |
| 39 | 1 | 3 | 8 | 1 | 1 | 1 |
| 40 | 1 | 3 | 8 | 1 | 1 | 1 |
| 41 | 1 | 3 | 8 | 1 | 1 | 1 |
| 42 | 1 | 3 | 8 | 1 | 1 | 1 |
| 43 | 1 | 3 | 8 | 1 | 1 | 1 |
| 44 | 1 | 3 | 8 | 1 | 1 | 1 |
| 45 | 1 | 3 | 8 | 1 | 1 | 1 |
| 46 | 1 | 3 | 9 | 1 | 1 | 1 |
| 47 | 1 | 3 | 8 | 1 | 1 | 1 |
| 48 | 1 | 3 | 8 | 1 | 1 | 1 |
| 49 | 1 | 3 | 9 | 1 | 1 | 1 |
| 50 | 1 | 3 | 9 | 1 | 1 | 1 |

TABLE 24e
Data for Staphylococcus, particularly S. aureus (continued)

| No. | Ampicillin_pv_adj | Ampicillin/Sulbactam_pv_adj | Cefepim_pv_adj | Cefotaxim_pv_adj |
|---|---|---|---|---|
| 1 | 2.20E−08 | 5.96E−37 | 5.96E−37 | 5.96E−37 |
| 2 | 2.20E−08 | 5.96E−37 | 5.96E−37 | 5.96E−37 |
| 3 | 2.20E−08 | 5.96E−37 | 5.96E−37 | 5.96E−37 |
| 4 | 4.64E−08 | 4.55E−35 | 4.55E−35 | 4.55E−35 |
| 5 | 2.20E−08 | 2.16E−33 | 2.16E−33 | 2.16E−33 |
| 6 | 2.22E−09 | 1.64E−31 | 1.64E−31 | 1.64E−31 |
| 7 | 3.22E−07 | 2.72E−27 | 2.72E−27 | 2.72E−27 |
| 8 | 3.22E−07 | 2.72E−27 | 2.72E−27 | 2.72E−27 |
| 9 | 3.22E−07 | 2.72E−27 | 2.72E−27 | 2.72E−27 |
| 10 | 3.22E−07 | 2.72E−27 | 2.72E−27 | 2.72E−27 |
| 11 | 3.22E−07 | 2.72E−27 | 2.72E−27 | 2.72E−27 |
| 12 | 6.85E−07 | 2.72E−27 | 2.72E−27 | 2.72E−27 |
| 13 | 2.90E−07 | 1.05E−25 | 1.05E−25 | 1.05E−25 |
| 14 | 3.22E−07 | 2.72E−27 | 2.72E−27 | 2.72E−27 |
| 15 | 3.22E−07 | 2.72E−27 | 2.72E−27 | 2.72E−27 |
| 16 | 3.22E−07 | 2.72E−27 | 2.72E−27 | 2.72E−27 |
| 17 | 3.22E−07 | 2.72E−27 | 2.72E−27 | 2.72E−27 |
| 18 | 2.90E−07 | 1.05E−25 | 1.05E−25 | 1.05E−25 |
| 19 | 2.90E−07 | 1.05E−25 | 1.05E−25 | 1.05E−25 |
| 20 | 8.65E−04 | 1.18E−21 | 1.18E−21 | 1.18E−21 |
| 21 | 8.65E−04 | 1.18E−21 | 1.18E−21 | 1.18E−21 |
| 22 | 3.21E−03 | 7.21E−21 | 7.21E−21 | 7.21E−21 |
| 23 | 3.21E−03 | 7.21E−21 | 7.21E−21 | 7.21E−21 |
| 24 | 1.55E−03 | 1.27E−19 | 1.27E−19 | 1.27E−19 |
| 25 | 1.83E−03 | 2.01E−19 | 2.01E−19 | 2.01E−19 |
| 26 | 1.26E−02 | 1.32E−20 | 1.32E−20 | 1.32E−20 |
| 27 | 1.18E−02 | 7.81E−20 | 7.81E−20 | 7.81E−20 |
| 28 | 1.18E−02 | 7.81E−20 | 7.81E−20 | 7.81E−20 |
| 29 | 1.26E−02 | 7.25E−19 | 7.25E−19 | 7.25E−19 |
| 30 | 3.28E−02 | 3.76E−18 | 3.76E−18 | 3.76E−18 |
| 31 | 4.05E−03 | 1.35E−15 | 1.35E−15 | 1.35E−15 |
| 32 | 1.24E−02 | 1.13E−19 | 1.13E−19 | 1.13E−19 |
| 33 | 1.11E−03 | 1.73E−15 | 1.73E−15 | 1.73E−15 |
| 34 | 1.27E−02 | 6.35E−19 | 6.35E−19 | 6.35E−19 |
| 35 | 2.32E−02 | 3.05E−13 | 3.05E−13 | 3.05E−13 |
| 36 | 7.10E−03 | 2.03E−18 | 2.03E−18 | 2.03E−18 |
| 37 | 7.10E−03 | 2.03E−18 | 2.03E−18 | 2.03E−18 |
| 38 | 1.24E−02 | 2.91E−15 | 2.91E−15 | 2.91E−15 |
| 39 | 3.37E−02 | 1.60E−16 | 1.60E−16 | 1.60E−16 |
| 40 | 5.70E−02 | 1.88E−12 | 1.88E−12 | 1.88E−12 |
| 41 | 1.15E−01 | 1.25E−15 | 1.25E−15 | 1.25E−15 |
| 42 | 3.84E−02 | 9.78E−11 | 9.78E−11 | 9.78E−11 |
| 43 | 3.56E−02 | 5.77E−17 | 5.77E−17 | 5.77E−17 |
| 44 | 3.37E−02 | 1.60E−16 | 1.60E−16 | 1.60E−16 |
| 45 | 3.37E−02 | 1.60E−16 | 1.60E−16 | 1.60E−16 |
| 46 | 2.90E−07 | 1.61E−15 | 1.61E−15 | 1.61E−15 |
| 47 | 7.69E−02 | 7.81E−20 | 7.81E−20 | 7.81E−20 |
| 48 | 8.07E−02 | 6.08E−12 | 6.08E−12 | 6.08E−12 |
| 49 | 2.90E−07 | 1.61E−15 | 1.61E−15 | 1.61E−15 |
| 50 | 3.04E−06 | 1.82E−17 | 1.82E−17 | 1.82E−17 |

TABLE 24f
Data for Staphylococcus, particularly S. aureus (continued)

| No. | Cefuroxim_pv_adj | Ciprofloxacin_pv_adj | Clindamycin_pv_adj | Erythromycin_pv_adj |
|---|---|---|---|---|
| 1 | 1.02E−172 | 4.82E−131 | 5.41E−111 | 1.04E−111 |
| 2 | 1.02E−172 | 4.82E−131 | 5.41E−111 | 1.04E−111 |
| 3 | 1.02E−172 | 3.02E−132 | 6.31E−112 | 7.39E−113 |
| 4 | 1.19E−170 | 1.00E−131 | 5.45E−114 | 1.72E−111 |
| 5 | 9.55E−169 | 1.65E−131 | 8.55E−113 | 3.44E−110 |
| 6 | 3.09E−155 | 2.03E−145 | 7.78E−102 | 4.54E−100 |
| 7 | 2.00E−140 | 4.08E−138 | 6.00E−125 | 2.44E−127 |
| 8 | 2.00E−140 | 5.95E−135 | 7.70E−123 | 2.44E−127 |
| 9 | 2.00E−140 | 4.08E−138 | 6.00E−125 | 2.44E−127 |
| 10 | 2.29E−138 | 2.11E−136 | 1.31E−123 | 4.65E−126 |
| 11 | 2.29E−138 | 3.02E−133 | 1.67E−121 | 4.65E−126 |
| 12 | 1.01E−138 | 1.36E−128 | 4.01E−120 | 1.01E−123 |
| 13 | 2.71E−145 | 1.43E−135 | 2.49E−122 | 2.94E−121 |
| 14 | 5.87E−142 | 6.84E−140 | 7.88E−125 | 3.61E−124 |
| 15 | 5.87E−142 | 6.84E−140 | 7.88E−125 | 3.61E−124 |
| 16 | 5.87E−142 | 6.84E−140 | 7.88E−125 | 3.61E−124 |
| 17 | 5.87E−142 | 6.84E−140 | 7.88E−125 | 3.61E−124 |
| 18 | 3.15E−140 | 6.84E−140 | 1.65E−123 | 1.01E−122 |
| 19 | 3.78E−139 | 5.24E−139 | 7.90E−123 | 4.58E−122 |
| 20 | 3.99E−125 | 5.65E−132 | 3.88E−136 | 8.83E−140 |
| 21 | 5.82E−123 | 4.09E−130 | 1.24E−134 | 2.39E−138 |
| 22 | 4.30E−124 | 5.65E−132 | 7.67E−139 | 1.30E−142 |
| 23 | 4.30E−124 | 5.65E−132 | 7.67E−139 | 1.30E−142 |
| 24 | 8.70E−122 | 4.09E−130 | 4.42E−135 | 5.01E−139 |
| 25 | 1.95E−112 | 3.48E−117 | 1.09E−121 | 8.26E−126 |
| 26 | 9.99E−102 | 2.00E−99 | 7.42E−94 | 1.88E−93 |
| 27 | 9.92E−101 | 1.25E−100 | 4.84E−95 | 2.65E−94 |
| 28 | 1.08E−99 | 6.62E−99 | 5.06E−95 | 1.80E−94 |
| 29 | 4.45E−100 | 1.46E−101 | 3.05E−98 | 1.82E−99 |
| 30 | 3.62E−99 | 6.76E−98 | 4.11E−89 | 2.04E−88 |
| 31 | 5.46E−82 | 8.46E−90 | 4.95E−69 | 2.56E−67 |
| 32 | 3.45E−93 | 1.68E−88 | 1.37E−90 | 2.27E−88 |
| 33 | 7.10E−92 | 7.29E−86 | 6.57E−78 | 1.16E−76 |
| 34 | 3.46E−90 | 5.20E−83 | 1.49E−80 | 4.89E−80 |
| 35 | 9.56E−73 | 1.94E−83 | 1.78E−63 | 2.45E−61 |
| 36 | 1.95E−83 | 3.50E−91 | 5.92E−79 | 2.14E−84 |
| 37 | 1.95E−83 | 3.50E−91 | 5.92E−79 | 2.14E−84 |
| 38 | 7.71E−76 | 4.08E−77 | 6.05E−58 | 6.49E−57 |
| 39 | 3.93E−89 | 4.20E−78 | 5.89E−71 | 3.43E−72 |
| 40 | 3.54E−69 | 3.19E−77 | 4.43E−58 | 3.86E−57 |
| 41 | 8.95E−84 | 1.49E−77 | 1.71E−74 | 1.87E−74 |
| 42 | 3.77E−75 | 8.95E−84 | 6.90E−85 | 9.85E−84 |
| 43 | 6.75E−81 | 1.60E−81 | 9.46E−72 | 9.56E−79 |
| 44 | 3.58E−81 | 2.83E−81 | 9.63E−72 | 1.15E−78 |
| 45 | 4.14E−80 | 2.83E−81 | 1.29E−70 | 1.77E−77 |
| 46 | 7.59E−62 | 5.15E−79 | 7.94E−76 | 5.98E−76 |
| 47 | 6.11E−79 | 1.32E−73 | 5.43E−98 | 2.20E−97 |
| 48 | 1.16E−77 | 7.87E−68 | 1.31E−67 | 3.92E−67 |
| 49 | 5.08E−59 | 3.55E−74 | 3.25E−71 | 5.25E−71 |
| 50 | 4.13E−78 | 4.35E−52 | 2.56E−53 | 1.24E−51 |

TABLE 24g
Data for Staphylococcus, particularly S. aureus (continued)

| No. | Imipenem_pv_adj | Levofloxacin_pv_adj | Moxifloxacin_pv_adj | Oxacillin_pv_adj |
|---|---|---|---|---|
| 1 | 2.22E−97 | 8.36E−31 | 1.85E−167 | 9.38E−227 |
| 2 | 2.22E−97 | 8.36E−31 | 1.85E−167 | 9.38E−227 |
| 3 | 2.22E−97 | 8.36E−31 | 1.24E−168 | 2.67E−225 |
| 4 | 5.09E−91 | 5.82E−30 | 1.90E−168 | 1.77E−211 |
| 5 | 2.50E−88 | 1.50E−28 | 3.37E−166 | 3.22E−210 |
| 6 | 1.02E−75 | 5.49E−34 | 4.29E−188 | 2.96E−187 |
| 7 | 5.60E−79 | 1.02E−27 | 1.24E−168 | 6.72E−181 |
| 8 | 5.60E−79 | 1.02E−27 | 8.38E−166 | 6.72E−181 |
| 9 | 5.60E−79 | 1.02E−27 | 1.24E−168 | 6.72E−181 |
| 10 | 5.60E−79 | 1.02E−27 | 9.67E−167 | 8.54E−179 |
| 11 | 7.66E−78 | 1.02E−27 | 6.64E−164 | 8.54E−179 |
| 12 | 5.60E−79 | 5.41E−27 | 4.22E−160 | 1.82E−175 |
| 13 | 1.11E−77 | 1.82E−28 | 7.77E−170 | 3.23E−175 |
| 14 | 5.16E−79 | 1.02E−27 | 1.02E−172 | 9.13E−175 |
| 15 | 5.16E−79 | 1.02E−27 | 1.02E−172 | 9.13E−175 |
| 16 | 5.16E−79 | 1.02E−27 | 1.02E−172 | 9.13E−175 |
| 17 | 5.16E−79 | 1.02E−27 | 1.02E−172 | 9.13E−175 |
| 18 | 1.11E−77 | 4.43E−26 | 5.10E−171 | 2.26E−173 |
| 19 | 1.11E−77 | 4.43E−26 | 4.94E−170 | 2.40E−172 |
| 20 | 2.49E−65 | 7.88E−28 | 2.60E−167 | 1.43E−155 |
| 21 | 7.09E−65 | 7.88E−28 | 3.13E−166 | 2.33E−153 |
| 22 | 1.38E−64 | 8.83E−27 | 3.37E−166 | 1.17E−154 |
| 23 | 1.38E−64 | 8.83E−27 | 3.37E−166 | 1.17E−154 |
| 24 | 6.20E−63 | 2.26E−24 | 7.17E−161 | 3.62E−151 |
| 25 | 1.34E−61 | 1.22E−26 | 4.17E−152 | 4.81E−142 |
| 26 | 6.28E−51 | 3.77E−23 | 1.59E−135 | 2.07E−120 |
| 27 | 6.51E−51 | 2.53E−22 | 1.70E−135 | 8.40E−122 |
| 28 | 6.51E−51 | 2.53E−22 | 1.78E−134 | 8.52E−120 |
| 29 | 5.53E−51 | 1.45E−21 | 4.06E−133 | 1.84E−119 |
| 30 | 8.78E−49 | 9.16E−21 | 1.01E−130 | 3.53E−117 |
| 31 | 8.13E−44 | 1.25E−24 | 4.84E−126 | 3.22E−102 |
| 32 | 2.98E−44 | 2.87E−19 | 6.20E−122 | 5.33E−111 |
| 33 | 6.56E−47 | 5.69E−23 | 5.76E−120 | 7.13E−108 |
| 34 | 4.99E−46 | 2.00E−18 | 1.85E−116 | 2.91E−105 |
| 35 | 1.79E−38 | 1.08E−20 | 7.19E−116 | 1.17E−92 |
| 36 | 4.65E−43 | 6.88E−21 | 4.22E−113 | 2.39E−97 |
| 37 | 4.65E−43 | 6.88E−21 | 4.22E−113 | 2.39E−97 |
| 38 | 1.60E−42 | 7.01E−24 | 4.84E−112 | 7.55E−91 |
| 39 | 1.54E−44 | 3.19E−20 | 4.64E−110 | 2.85E−100 |
| 40 | 4.20E−36 | 3.14E−19 | 5.76E−108 | 5.09E−88 |
| 41 | 1.65E−39 | 8.87E−19 | 2.41E−107 | 6.05E−97 |
| 42 | 8.79E−40 | 1.09E−14 | 3.00E−106 | 3.22E−94 |
| 43 | 1.21E−43 | 1.71E−19 | 1.58E−102 | 1.41E−92 |
| 44 | 2.98E−44 | 8.40E−19 | 1.07E−101 | 4.03E−92 |
| 45 | 8.13E−44 | 8.40E−19 | 1.07E−101 | 4.03E−92 |
| 46 | 2.94E−31 | 2.14E−17 | 5.26E−101 | 5.94E−79 |
| 47 | 1.67E−43 | 1.76E−21 | 8.02E−101 | 1.17E−94 |
| 48 | 2.19E−35 | 1.61E−13 | 1.79E−95 | 4.56E−88 |
| 49 | 4.69E−30 | 2.14E−17 | 1.80E−94 | 5.69E−74 |
| 50 | 3.32E−41 | 8.45E−15 | 1.32E−71 | 2.83E−94 |

TABLE 24h
Data for Staphylococcus, particularly S. aureus (continued)

| No. | Penicillin G_pv_adj | Piperacillin/Tazobactam_pv_adj | Tetracyclin_pv_adj | Tobramycin_pv_adj |
|---|---|---|---|---|
| 1 | 1.37E−41 | 1.55E−21 | 1.22E−01 | 2.16E−15 |
| 2 | 1.37E−41 | 1.55E−21 | 1.22E−01 | 2.16E−15 |
| 3 | 1.51E−41 | 1.55E−21 | 9.63E−02 | 2.16E−15 |
| 4 | 3.46E−40 | 1.17E−19 | 2.75E−02 | 6.21E−16 |
| 5 | 6.83E−41 | 2.25E−18 | 3.70E−02 | 2.16E−15 |
| 6 | 3.80E−41 | 1.59E−17 | 1.27E−02 | 1.94E−13 |
| 7 | 6.95E−35 | 3.69E−14 | 5.90E−03 | 7.81E−15 |
| 8 | 6.95E−35 | 3.69E−14 | 5.90E−03 | 7.81E−15 |
| 9 | 6.95E−35 | 3.69E−14 | 5.90E−03 | 7.81E−15 |
| 10 | 1.50E−34 | 3.69E−14 | 8.03E−03 | 7.81E−15 |
| 11 | 1.50E−34 | 3.69E−14 | 8.03E−03 | 7.81E−15 |
| 12 | 5.97E−34 | 3.69E−14 | 8.79E−03 | 7.81E−15 |
| 13 | 5.30E−34 | 5.46E−13 | 9.97E−04 | 9.71E−16 |
| 14 | 1.23E−34 | 3.69E−14 | 1.42E−03 | 7.81E−15 |
| 15 | 1.23E−34 | 3.69E−14 | 1.42E−03 | 7.81E−15 |
| 16 | 1.23E−34 | 3.69E−14 | 1.42E−03 | 7.81E−15 |
| 17 | 1.23E−34 | 3.69E−14 | 1.42E−03 | 7.81E−15 |
| 18 | 1.23E−34 | 5.46E−13 | 1.42E−03 | 3.02E−14 |
| 19 | 1.23E−34 | 5.46E−13 | 1.42E−03 | 3.02E−14 |
| 20 | 5.10E−21 | 3.04E−11 | 5.98E−04 | 7.15E−15 |
| 21 | 9.90E−21 | 3.04E−11 | 2.52E−04 | 7.15E−15 |
| 22 | 2.82E−20 | 9.29E−11 | 5.97E−04 | 2.24E−14 |
| 23 | 2.82E−20 | 9.29E−11 | 5.97E−04 | 2.24E−14 |
| 24 | 1.92E−20 | 4.28E−09 | 8.65E−04 | 4.98E−13 |
| 25 | 1.42E−21 | 6.78E−10 | 2.40E−03 | 6.71E−15 |
| 26 | 2.07E−10 | 4.04E−10 | 5.35E−05 | 4.17E−12 |
| 27 | 1.36E−10 | 1.16E−09 | 2.27E−05 | 1.33E−11 |
| 28 | 2.18E−10 | 1.16E−09 | 3.46E−05 | 1.33E−11 |
| 29 | 4.59E−14 | 1.16E−09 | 8.29E−05 | 7.56E−11 |
| 30 | 6.54E−10 | 2.97E−08 | 3.46E−05 | 2.92E−10 |
| 31 | 4.06E−09 | 7.73E−08 | 2.02E−05 | 2.25E−08 |
| 32 | 2.64E−11 | 3.31E−11 | 2.07E−02 | 6.23E−11 |
| 33 | 2.28E−19 | 2.60E−08 | 2.52E−06 | 9.88E−10 |
| 34 | 1.20E−07 | 3.78E−10 | 1.24E−02 | 9.10E−11 |
| 35 | 4.14E−07 | 1.59E−06 | 1.78E−06 | 6.53E−07 |
| 36 | 4.05E−13 | 7.74E−09 | 1.25E−04 | 1.01E−10 |
| 37 | 4.05E−13 | 7.74E−09 | 1.25E−04 | 1.01E−10 |
| 38 | 4.22E−06 | 1.49E−07 | 1.46E−05 | 5.29E−08 |
| 39 | 1.18E−06 | 8.70E−08 | 2.19E−04 | 7.09E−11 |
| 40 | 1.87E−06 | 1.59E−06 | 3.63E−05 | 1.92E−07 |
| 41 | 4.31E−06 | 6.90E−07 | 1.08E−04 | 2.74E−09 |
| 42 | 6.34E−11 | 4.80E−05 | 2.10E−05 | 6.87E−09 |
| 43 | 2.66E−09 | 4.09E−08 | 4.92E−04 | 1.94E−10 |
| 44 | 7.22E−09 | 8.70E−08 | 3.32E−04 | 6.07E−10 |
| 45 | 2.79E−09 | 8.70E−08 | 3.32E−04 | 6.07E−10 |
| 46 | 1.54E−26 | 8.34E−08 | 2.05E−05 | 1.24E−11 |
| 47 | 4.32E−03 | 1.16E−09 | 4.05E−06 | 1.33E−11 |
| 48 | 1.28E−06 | 1.86E−05 | 1.61E−03 | 1.89E−08 |
| 49 | 3.43E−27 | 8.34E−08 | 1.11E−03 | 1.24E−11 |
| 50 | 2.12E−15 | 1.05E−10 | 6.95E−03 | 1.62E−07 |

TABLE 24i
Data for Staphylococcus, particularly S. aureus (continued)

| No. | Locus.Tag | Gene.Symbol | GenBank.Accession | Chromosome |
|---|---|---|---|---|
| 1 | HMPREF0791_1752 | mecA | ZP_04797671 | |
| 2 | HMPREF0794_1488 | ugpQ | ZP_06614206 | |
| 3 | HMPREF0794_1485 | mecR | ZP_06614203 | |
| 4 | SIAG_00762 | | ZP_06819251 | |
| 5 | HMPREF0789_1682 | | ZP_04825874 | |
| 6 | SAMG_01950 | | ZP_05682863 | |
| 7 | Missing locus_tag: FN433596.cds78.83191..82796 | | CBI47961 | |
| 8 | SATW20_00761 | | CBI67631 | |
| 9 | SERP2515 | | YP_190057 | |
| 10 | SAIG_02579 | | ZP_05694555 | |
| 11 | SERP2519 | mecI | YP_190060 | |
| 12 | SERP2505 | | YP_190047 | |
| 13 | HMPREF0794_1451 | | ZP_06614169 | |
| 14 | SERP2490 | kdeP | YP_190033 | |
| 15 | SERP2487 | kdpA | YP_190030 | |
| 16 | SERP2485 | kdpC | YP_190028 | |
| 17 | SERP2489 | kdpD | YP_190032 | |
| 18 | SERP2486 | kdpB | YP_190029 | |
| 19 | SAIG_01884 | | ZP_05693385 | |
| 20 | SERP1347 | tnpA-2 | YP_188919 | |
| 21 | SERP1223 | tnpB-1 | YP_188797 | |
| 22 | SLAG_02844 | | ZP_06930609 | |
| 23 | SA0049 | ant(9) | NP_373289 | |
| 24 | SERP1342 | | YP_188914 | |
| 25 | HMPREF0773_2426 | radC | ZP_04829125 | |
| 26 | SAFG_01021 | | ZP_05703394 | |
| 27 | SAFG_01015 | | ZP_05703388 | |
| 28 | SA2981_2149 | | ADC38360 | |
| 29 | ECTR2_1640 | | CBX35020 | |
| 30 | SA2981_1770 | | ADC37981 | |
| 31 | SAB0169 | | YP_415679 | |
| 32 | SaurJH1_0467 | | YP_001315613 | |
| 33 | SERP1345 | tnpC-2 | YP_188917 | |
| 34 | SGAG_02626 | | ZP_06303506 | |
| 35 | ECTR2_2075 | | CBX35404 | |
| 36 | HMPREF0774_2643 | | ZP_04869332 | |
| 37 | SAHG_01730 | | ZP_05696261 | |
| 38 | SAA6159_00204 | coa | ADL22160 | |
| 39 | SARG_01832 | | ZP_06332611 | |
| 40 | SAIG_01373 | | ZP_05693621 | |
| 41 | SANG_00111 | | ZP_05682471 | |
| 42 | SAHG_02693 | | ZP_05696106 | |
| 43 | SAJG_00740 | | ZP_05692517 | |
| 44 | SaurJH1_0188 | | YP_001315337 | |
| 45 | SGAG_00714 | | ZP_06301594 | |
| 46 | ECTR2_2580 | | CBX35910 | plasmid |
| | | | | pLUH02 |
| 47 | SA2981_0414 | lpl3 | ADC36625 | |
| 48 | SA2981_1977 | agrB | ADC38188 | |
| 49 | SMAG_02765 | | ZP_06817387 | |
| 50 | HMPREF0798_02109 | | ZP_07844597 | |

TABLE 24j
Data for Staphylococcus, particularly S. aureus (continued)

| No. | Start.Coord | End.Coord | Strand | Scaffold.ID |
|---|---|---|---|---|
| 1 | 1335 | 3341 | + | 645076738 |
| 2 | 7348 | 8091 | − | 647019109 |
| 3 | 3685 | 4599 | − | 647019109 |
| 4 | 3987 | 5336 | − | 647537018 |
| 5 | 1842 | 3491 | − | 645076234 |
| 6 | 89170 | 89277 | − | 645958292 |
| 7 | 82796 | 84130 | − | 646862418 |
| 8 | 81146 | 81214 | − | 646862418 |
| 9 | 2570266 | 2571330 | + | 637000098 |
| 10 | 6265 | 7374 | + | 645958144 |
| 11 | 2574428 | 2574799 | − | 637000098 |
| 12 | 2562107 | 2562424 | + | 637000098 |
| 13 | 8938 | 9252 | + | 647019108 |
| 14 | 2549489 | 2550184 | + | 637000098 |
| 15 | 2544901 | 2546577 | − | 637000098 |
| 16 | 2542288 | 2542845 | − | 637000098 |
| 17 | 2546845 | 2549514 | + | 637000098 |
| 18 | 2542861 | 2544882 | − | 637000098 |
| 19 | 76580 | 76657 | − | 645958116 |
| 20 | 1403752 | 1404837 | − | 637000098 |
| 21 | 1255425 | 1257317 | − | 637000098 |
| 22 | 4557 | 5288 | − | 647016972 |
| 23 | 56859 | 57641 | − | 637000072 |
| 24 | 1399547 | 1399606 | + | 637000098 |
| 25 | 4478 | 5164 | − | 645076413 |
| 26 | 277066 | 278082 | + | 645957989 |
| 27 | 272112 | 272231 | − | 645957989 |
| 28 | 2299803 | 2300126 | − | 646862390 |
| 29 | 1804139 | 1805368 | − | 651053129 |
| 30 | 1899111 | 1899692 | + | 646862390 |
| 31 | 209129 | 211012 | + | 637000460 |
| 32 | 487880 | 489091 | + | 640753011 |
| 33 | 1401479 | 1401856 | − | 637000098 |
| 34 | 245 | 686 | − | 647008393 |
| 35 | 2210164 | 2210319 | − | 651053129 |
| 36 | 16441 | 17124 | + | 645076159 |
| 37 | 85620 | 86303 | + | 645958072 |
| 38 | 242193 | 244169 | + | 648231718 |
| 39 | 177946 | 180372 | + | 647535981 |
| 40 | 38140 | 39216 | + | 645958123 |
| 41 | 77988 | 79490 | − | 645958383 |
| 42 | 5009 | 5929 | − | 645958068 |
| 43 | 78131 | 78853 | + | 645958189 |
| 44 | 221049 | 221729 | + | 640753011 |
| 45 | 44419 | 44616 | + | 647008364 |
| 46 | 12682 | 13458 | − | 651053131 |
| 47 | 456367 | 457155 | + | 646862390 |
| 48 | 2096829 | 2097392 | + | 646862390 |
| 49 | 14918 | 15697 | − | 647017059 |
| 50 | 54037 | 54601 | + | 651285048 |

[0302] For examples 1-12, as well as further testes microorganisms, a consolidated list of the centroids that were found is given in the following Table 25.

TABLE 25
List of centroids in Examples

| Organism | # samples | MetaRef centroids | MetaRef centroid notes |
|---|---|---|---|
| Acinetobacter baumannii | 448 | baumannii.1380.centroids | |
| Citrobacter koseri | 108 | Citrobacter.1608.centroids | NA for C. koseri, used centroids of genus |
| Enterobacter aerogenes | 298 | aerogenes.5220.centroids | |
| Enterobacter cloacae | 397 | cloacae.3734.centroids | |
| Escherichia coli | 1144 | coli.318.centroids | |
| Klebsiella oxytoca | 389 | Klebsiella.1640.centroids | NA for K. oxytoca, used centroids of genus |
| Klebsiella pneumoniae | 1179 | pneumoniae.1641.centroids | |
| Morganella morganii | 297 | NA | NA for M. morgannii or Morganella |
| Proteus | 582 | Proteus.2318.centroids | |
| Pseudomonas aeruginosa | 1042 | aeruginosa.640.centroids | |
| Salmonella | 634 | Salmonella.713.centroids | |
| Shigella | 442 | Shigella.730.centroids | |
| Serratia marcescens | 437 | Serratia.1671.centroids | NA for S. marcescens, used centroids of |
| | | | genus |
| Stenotrophomonas | 494 | Stenotrophomonas.2333.centroids | NA for S. maltophilia, used centroids of |
| maltophilia | | | genus |
| Staphylococcus aureus | 987 | aureus.754.centroids | |
| Staphylococcus aureus | 985 | aureus.754.centroids | |

# significant centroids
before/after
annotation filtering

| Organism | before | after |
|---|---|---|
| Acinetobacter baumannii | 2859 | 810 |
| Citrobacter koseri | 0 | 0 |
| Enterobacter aerogenes | 126 | 56 |
| Enterobacter cloacae | 1417 | 763 |
| Escherichia coli | 6739 | 1625 |
| Klebsiella oxytoca | 951 | 507 |
| Klebsiella pneumoniae | 2571 | 908 |
| Morganella morganii | NA | NA |
| Proteus | 3401 | 1504 |
| Pseudomonas aeruginosa | 1256 | 315 |
| Salmonella | 2333 | 670 |
| Shigella | 2046 | 788 |
| Serratia marcescens | 537 | 299 |
| Stenotrophomonas maltophilia | NA | NA |
| Staphylococcus aureus | 1333 | 367 |
| Staphylococcus aureus | 1435 | 395 |

[0303] In Table 25 herein the number of significant centroids (with the respective p-values) found by the present method before and after the above filtering process is given. This shows that, while the best 50 gene sequences are given for the Examples in the odd Tables (Tables 1, 3, 5, etc.), more than those 50 gene sequences were actually found for all the examples after filtering, e.g. 810 for Acinetobacter baumannii.

[0304] As noted above, for the even Tables (Tables 2, 4, 6, etc.) the data are further processed.

[0305] As can be seen from the Examples, similarities in gene sequences can be found over all the bacterial species, showing that they form clusters, which can also be seen in the fact that for several bacteria centroids from other bacterial species are found as suitable, e.g. from E.coli.

[0306] A genetic test for the combined pathogen identification and antimicrobial susceptibility testing direct from the patient sample can reduce the time-to actionable result significantly from several days to hours, thereby enabling targeted treatment. Furthermore, this approach will not be restricted to central labs, but point of care devices can be developed that allow for respective tests. Such technology along with the present methods and computer program products could revolutionize the care, e.g. in intense care units or for admissions to hospitals in general. Furthermore, even applications like real time outbreak monitoring can be achieved using the present methods.

[0307] Compared to approaches using MALDI-TOF MS, the present approach has the advantage that it covers almost the complete genome and thus enables us to identify the potential genomic structural changes that might be related to resistance. While MALDI-TOF MS can also be used to identify point mutations in bacterial proteins, this technology only detects a subset of proteins and of these not all are equally well covered. In addition, the identification and differentiation of certain related strains is not always feasible.

[0308] The present method allows computing a best breakpoint for the separation of isolates into resistant and susceptible groups. The inventors designed a flexible software tool that allows to consider—besides the best breakpoints—also values defined by different guidelines (e.g. European and US guidelines), preparing for an application of the GAST in different countries.

[0309] The current approach enables
[0310] a. Identification and validation of markers for genetic identification and susceptibility/resistance testing within one diagnostic test
[0311] b. Validation of known drug targets and modes of action
[0312] c. Detection of potentially novel resistance mechanisms leading to putative novel target/secondary target genes for new therapies

[0313] The current method is faster than classical culture-based predictions and has the potential to be faster than tests based on single bases, e.g. SNPs. Most remarkably the current method can help improve the accuracy of novel genetic tests.

[0314] With the present methods, structural variations can be detected, which particularly also include copy-number variations that can lead to gene dosage effects.

The application's sequence listing, which the Patent Office published only in electronic form, follows.

SEQUENCE LISTING (639 sequences)

SEQ ID NO: 1 - DNA, 2007 bp, artificial
  Centroid sequence
atgaaaaagataaaaattgttccacttattttaatagttgtagttgtcgggtttggtatatatttttatgcttcaaaagataaagaaattaataatactattgatgcaattgaagataaaaatttcaaacaagtttataaagatagcagttatatttctaaaagcgataatggtgaagtagaaatgactgaacgtccgataaaaatatataatagtttaggcgttaaagatataaacattcaggatcgtaaaataaaaaaagtatctaaaaataaaaaacgagtagatgctcaatataaaattaaaacaaactacggtaacattgatcgcaacgttcaatttaattttgttaaagaagatggtatgtggaagttagattgggatcatagcgtcattattccaggaatgcagaaagaccaaagcatacatattgaaaatttaaaatcagaacgtggtaaaattttagaccgaaacaatgtggaattggccaatacaggaacagcatatgagataggcatcgttccaaagaatgtatctaaaaaagattataaagcaatcgctaaagaactaagtatttctgaagactatatcaaacaacaaatggatcaaaattgggtacaagatgataccttcgttccacttaaaaccgttaaaaaaatggatgaatatttaagtgatttcgcaaaaaaatttcatcttacaactaatgaaacagaaagtcgtaactatcctctaggaaaagcgacttcacatctattaggttatgttggtcccattaactctgaagaattaaaacaaaaagaatataaaggctataaagatgatgcagttattggtaaaaagggactcgaaaaactttacgataaaaagctccaacatgaagatggctatcgtgtcacaatcgttgacgataatagcaatacaatcgcacatacattaatagagaaaaagaaaaaagatggcaaagatattcaactaactattgatgctaaagttcaaaagagtatttataacaacatgaaaaatgattatggctcaggtactgctatccaccctcaaacaggtgaattattagcacttgtaagcacaccttcatatgacgtctatccatttatgtatggcatgagtaacgaagaatataataaattaaccgaagataaaaaagaacctctgctcaacaagttccagattacaacttcaccaggttcaactcaaaaaatattaacagcaatgattgggttaaataacaaaacattagacgataaaacaagttataaaatcgatggtaaaggttggcaaaaagataaatcttggggtggttacaacgttacaagatatgaagtggtaaatggtaatatcgacttaaaacaagcaatagaatcatcagataacattttctttgctagagtagcactcgaattaggcagtaagaaatttgaaaaaggcatgaaaaaactaggtgttggtgaagatataccaagtgattatccattttataatgctcaaatttcaaacaaaaatttagataatgaaatattattagctgattcaggttacggacaaggtgaaatactgattaacccagtacagatcctttcaatctatagcgcattagaaaataatggcaatattaacgcacctcacttattaaaagacacgaaaaacaaagtttggaagaaaaatattatttccaaagaaaatatcaatctattaactgatggtatgcaacaagtcgtaaataaaacacataaagaagatatttatagatcttatgcaaacttaattggcaaatccggtactgcagaactcaaaatgaaacaaggagaaactggcagacaaattgggtggtttatatcatatgataaagataatccaaacatgatgatggctattaatgttaaagatgtacaagataaaggaatggctagctacaatgccaaaatctcaggtaaagtgtatgatgagctatatgagaacggtaataaaaaatacgatatagatgaataa

SEQ ID NO: 2 - DNA, 744 bp, artificial
  Centroid sequence
atgctaactgtatatggacatagaggattacctagtaaagctccggaaaatacaattgcatcatttaaagctgcttcagaagtagaaggtataaactggttggagttagatgttgcaattacaaaagatgaacaactgattatcattcatgatgattatttagaacggactacaaatatgtccggggaaataactgaattgaattatgatgaaattaaagatgcttctgcaggatcttggtttggtgaaaaattcaaagatgaacatttgccaactttcgatgatgtagtaaaaatagcaaatgaatataatatgaatttaaatgtagaattaaaaggtattactggaccgaatggactagcactttctaaaagtatggttaagcaagtggaagaacaattaacaaacttaaatcagaatcaagaagtgctcatttcaagctttaatgttgtgcttgttaaacttgcagaagaaatcatgccacaatataacagagcagttatattccatacaacttcgtttcgtgaagactggagaacacttttagattactgtaatgctaaaatagtaaacactgaagatgccaaacttactaaagcaaaagtaaaaatggtaaaagaagcgggttatgaattgaacgtatggactgtaaacaaaccagcacgtgcaaaccaacttgctaattggggagttgatggtatctttacagacaatgcagataaaatggtgcatttgtctcaatag

SEQ ID NO: 3 - DNA, 915 bp, artificial
  Centroid sequence
atgctctatataaaatatactcaaaatattatgtcacataagatttggttattagtgctcgtctccacgttaattccattaataccattttacaaaatatcgaattttacattttcaaaagatatgatgaatcgaaatgtatctgacacgacttcttcggttagtcatatgttagatggtcaacaatcatctgttacgaaagacttagcaattaatgttaatcagtttgagacctcaaatataacgtatatgattcttttgatatgggtatttggtagtttgttgtgcttattttatatgattaaggcattccgacaaattgatgttattaaaagttcgtcattggaatcgtcatatcttaatgaacgacttaaagtatgtcaaagtaagatgcagttctacaaaaagcatataacaattagttatagttcaaacattgataatccgatggtatttggtttagtgaaatcccaaattgtactaccaactgtcgtagtcgaaaccatgaatgacaaagaaattgaatatattattctacatgaactatcacatgtgaaaagtcatgacttaatattcaaccagctttatgttgtttttaaaatgatattctggtttaatcctgcactatatataagtaaaacaatgatggacaatgactgtgaaaaagtatgtgatagaaacgttttaaaaattttgaatcgccatgaacatatacgttatggtgaatcgatattaaaatgctctattttaaaatctcagcacataaataatgtggcagcacaatatttactaggttttaattcaaatattaaagaacgtgttaagtatattgcactttatgattcaatgcctaaacctaatcgaaacaagcgtattgttgcgtatattgtatgtagtatatcgagcttcacatga

SEQ ID NO: 4 - DNA, 1350 bp, artificial
  Centroid sequence
atgaaacaagtcataggctatttacgtcaaagtacgatgaaacaacaatctcttgcagcacagaaacaagctatcgaagcaataaccgaaaaacatcatattcaacatatcaacttttatagcgacaaacaatcaggacgcaaagataatcgtagtgggtatcgacaaataacacaattaattcaacaaggacagtgtgacatattatgctgttatcgtcttaataggttgcatcgtaatttgaaaaatgcattaaaactcatcaaattatgtcaaacatatcgtgttcatatcttaagtgtgcatgatggttattttgatatggatcaagctttcgaccgattcaagcttaatatttttatcagcttggccgaacttgaatcagataacattggagaacaagtcagaaatgggcttcaagaaaaagcaaagcaaggtcgattgattacaacccatgcgccctttggttacgaatatcacaacggaacattcatcatcaatcaaaatgagtcaccaacggtaaaggctgtattcaattattacattaaaggtcatggttataagaaaattgcacagttattagaagaagataacacgtatatcaatcgacaaccctatcaagttcgtaacattattatcaatcctaattattgtggtcgtgtcaacaatcaatatggtcaattcgacaatatgtttccttctattgtttccacaagtatatatgagcaagcgcagagacttcgattgcaaaaacaaaccaaacagacaccttcggataatcaactcaaacaaaaaatcaaatgcccatgttgtaatgcaacacttacaaatatgaccattagaaaaaagaatcatacattacgttactacgtctgtcctaaaaacatgaatgcttcacgctttgtctgtgattttaaaggcatcaatgcacaaacacttgaagataaagtattagaagtgtgccgagacttttatcaaaatcaacgcatctacacaaaaattaaaagtgcgattgacaaacgcatcaaaagacaaagaaacatagaaaaacatcacacattgactcaaaaacaactgatagaaaagttggcacaaggcatcattgatgcagaaacgttcagagaacaaacgcaatcattacgtcaacaaccgcaacgcactacatctatcaatgggcatcaaatacaaaacaccattcaaaatattattcaaaaacgtttcacgttaaacatgctgtatccctacattgatgaaattcttatcacaaaaagtaaaacactaatgggtatctatttcaaaaatgaacccttaaacatcgtcaatcaaacaacgcaatcgtcaattgcataa

SEQ ID NO: 5 - DNA, 1650 bp, artificial
  Centroid sequence
atgaagaaaggatgtaacataatgcaacaacttaaaacaaaacgtgtcggtatctatgtacgtgtatcaacagaaatgcaaagcacagaaggttatagtatcgacggacaaatcaatcaaatcaaagaatactgtgacttccatcattttgaagttaaagatatatacgctgatcgtggtatttcaggtaaatctatgaacagacctgagctccaacgtatgttgaaagatgcaaaagaaggcaatatagattgtgttatgatctacaaaacaaaccgattagctcgtaatacatcggatcttctgaaaatcgtcgaagatttgcataaacaaaatgtcgaatttttcagtttatcagagcgtatggaagtcaatacttcttctggtaaactcatgttacaaatacttgcgagtttctcagaattcgaacgtaataacattgtcgagaatgtatttatggggcaaacgagacgtgcccaagaaggctattatcaaggcaatttaccactaggttatgacaaaataccagatagtaaacacgagctaatgattaaccaacatgaagctaatattgtaaaatatatattcgagtcctatgccaaaggacatggctatcgtaaaatagccaatgcattgaatcacaaaggctatgtcactaaaaagggtaaaccttttagtattagttctatcacatatatattagctaacccattctatatcggcaaaattcaatttgcgaaatacaaagattggagtgaaaaacgtcgtaaagggctgaatgataaaccagtgatagctgaaggtaagcattcccccattattaatcaagatttatgggataaagtacaaatgcgtaaaaaacaagtcagtcaaaaaccccaagttcatggtaaaggaacgaatctgcttacaggcattatccattgtccccaatgtggcgcacctatggcagcaagcaatacaacgaatacacttaaagatgggaccaagaaacgtattcgttactattcatgtagtaattttcggaacaagggttccaaagtatgttcggcaaacagtgtaagagctgatgtgattgaagattatgtaatgaagcaaatactcgaaatagtcaaaagtgataaagtcattcaacgcgttgtagcacgtgttaatcaagaaaataaagttgatggcgctgcacttcatcacgatattgcttataagcaacaacaatatgatgaagtacaaaccaaactaaataacttgattaaaaccatagaggataatccggacttaacatcagtaatcagaccaagtattcaaaaatatgaaaagcaactcaatgacattacgaatcaaatcaaccaactcaaaaatcaacaaaatgaagataagtctttatttgatgccaaacaaatcagtaaactattacaacacatctttcaagatattaagcacatggaaaaatctcgactcaaagcattgtacctatcagtgattgatcgtattaatattagaaaagatggtaatcataaaaaacaattctatgtcacactcaaacttaataacgaaatcattaaacaacttttcaataataaacaactcgacgaagtgcatctcagcacttcgtctttatttttgccccaaacactatatcttactatttag

SEQ ID NO: 6 - DNA, 108 bp, artificial
  Centroid sequence
gtgcttgcacaatccttctgcttcttcgaatctgcaaatcccaatcatttcccgataaaaaatcattgtgggatgttctttagcaatttcaatataagcatcgtgtag

SEQ ID NO: 7 - DNA, 1335 bp, artificial
  Centroid sequence
ttgtttttcaaacaattttatgaagacaatttttcacaagcatcttatttaattggatgtcaacgtacaggagaagcaatgattattgaccctatacgagatttaacaaaatatttaaaagttgcagataaagaaggattcacaattactaaagctgcagaaacacatattcatgctgattttgcttcaggtattagagatgtggcaaataaattgaatgcaagtatatacgtatctgatgaaggtaaagatgaatttaattataaaaatatgcctaaacaaacacatttcgttaagcatcaagatattatctatttaggaaagattaaattagaagtcttacacactccaggccatccccctgagagtattagttttttacttactgacgaaggtgggggttccagtataccaatgggattatttagcggtgacttcatctttgttggtgatgtaggtagaccagatctattagaaaaagctgtaaatgttgaaggttctacaaaaatcggagcaaaacaaatgtatcagtccatacaatttgctgcaacattaccagactatattcaaatttggccaggtcatggtgcagggagtccttgtggtaaagcgctaggttcattacctacaactactttgggttatgagaaaataaacaactgggcttttaatgttaaagatgaaacttcatttatcgaaactttaacactcaatcagccagctccaccacaccatttttcacaaatgaaaaaaataaatcaatttggtatgcaaatgtaccaaccatataatgtttaccctagttcaagcaatacacaaactgcttttgatcttcgaagtaaagaagcattccatggtggtcatatgcatggaactatcaatattccttttaataaaacttttataaatcaaattggttggtatttagattatgactaagatattgaattaattggcgataaatctaccgttcaacaagctattcatgctttacaattaattggttttgaaaatgtaaaaagttaccgtttgccacaaacaaatatcgtcacatcatctattcatagttctgaaatgactggtgaagaacataatgtattagatgttcgtaatgatgatgaatggcgtaaaggtcatttaaaacaagcaattcatattcctcacggtaaacttttaaatgaagatatacctttcgataaaaatgacctaatttatgtacattgtcaatcaggtgttagaagttcaatagcggtaggaatattagaatataaaggatttacgaatattgttaacgttagaggtggctatcaacatttaccagcatttttaaaatag

SEQ ID NO: 8 - DNA, 69 bp, artificial
  Centroid sequence
atggatttcactggtgttattacaagcattattgatttaatcaagacttgcattcaggctttcggttaa

SEQ ID NO: 9 - DNA, 1065 bp, artificial
  Centroid sequence
atggaacaatacaaagaagtacacattaattcattaaacaaagaagaattagaaaaattggcaaaaatgggtcaattgattgatgttagaacaaaagaagaatatgaattaggacacattaacggttcaactttacacccagtagaagagattaaatcattcaataagaatagcaacaaaacgtattatatacattgtaaaagcggtaaccgaagcactaaagcttgcgattatttagccaaacaaggttatgatgtcgtgaatttaaagggtggatataaagattatgaagcaaagaacttcaatagtgctcctttaatagaaaaagatattgaaatcaaagagaatcgtaaacaatttgattttagaggtcttcagtgccctggacctattgttaatatcagtaaagaaattaacaatatttcaacgggtgagcaaatcgaggtaacagttacagatcctggtttcaatagtgatattaaaagttgggcgaaacaaacagggaatacccttgtaaatcttactgaagaagcaaatgtaattaatgcaattattcaaaaagaaaagccaaaagaatttgaaatcaatgacactgctacaggtacaacaattgttttatttagcggtgagttagataaggcagtagcagcaatgatcatcgcaaatggcgctaaagcagcaggtaaagatgtaactattttctttactttttggggcctcaacgcattaaaaaaagcgcaatcaactcgcgttaaaaagaaaggtatttccaaaatgtttgaccttatgttacctaaggatccaatacatatgccattatcaaaaatgaatatgtttggactaggtaatattatgatgcgttatgtaatgaacaagaaaaatgttgattctttatactcacttatcgatcaagcaatcgatcaagatataaagttaattgcttgtaccatgagtatggatgttatgggaatttcaaaagaagaattaagagatgaagtcgattatggtggcgtaggtacttatattggacatactgagcaagcaaatcataacttatttatctaa

SEQ ID NO: 10 - DNA, 1110 bp, artificial
  Centroid sequence
gtgctaagggaaatttataaccatcataatatttcgcgtactcaaatatctaaaaatcttgagattaataaggcaacgatttctagtattttgaataagttaaagtataaatctcttgttaatgaggttggtgagggtgatagcacgaagagtggtggtagaaaacctattcttctgaaggttaatcatctttatggttattttatttctttggatttaacttatagttctgttgaagtgatgtacaattattttgatggtaatgtcattaagcatgaatcttatgatttacctgatgaaaaggttagtagtatattaagcataataaaaaaacatattgatattcaggagaaacttgatacttataacggactattaggtgtgtctgtttctatacatggagttgtggataatgagcagcatgtgacatatttaccattccatgaaactgaaggaatttcaattgctaagaaaataaaagaaattactaatgttccagtcgtagttgaaaatgaagcgaatctttcagcgttatatgaacgtaattttaatcataatttatcctacaataatcttattgctttaagtatacataaaggtattggtgctgggcttattattaataatcaattgtatcgtggtgcaaatggggaagcgggtgaaattggaaaaacacttgtctcaaaagttagcgataatgtggagatctttcataagattgaagatattttttcacaagaagctttactgcataatttaagtaatcaactaaatgagaagatgacgcttagcaaattaattcaattttataatgaaaaaaatccagtcgtagttgaagaaatggaacaatttataaataaaattgctgttttaatacataatttaaacacccagtttaatccgaatgcaatttacattaactgtccattgttcaatgaaatgcctgaaatattagaagcaattaagaaccagttcaaacaatattcacgtaacgaaattcaaataaagttaacatctaatgtcaaatttgcaactttgctaggtggtacattagcaattatccaaaaagtactacagattaatgatatttacttagatataaaagcataa

SEQ ID NO: 11 - DNA, 372 bp, artificial
  Centroid sequence
atggataataaaacgtatgaaatatcatctgcagaatgggaagttatgaatatcatttggatgaaaaaatatgcaagtgcgaataatataatagaagaaatacaaatgcaaaaggactggagtccaaaaaccattcgtacacttataacgagattgtataaaaagggatttatagatcgtaaaaaagacaataaaatttttcaatattactctcttgtagaagaaagtgatataaaatataaaacatctaaaaactttatcaataaagtatacaaaggcggtttcaattcacttgtcttaaactttgtagaaaaagaagatctatcacaagatgaaatagaagaattgagaaatatattgaataaaaaataa

SEQ ID NO: 12 - DNA, 318 bp, artificial
  Centroid sequence
atgaaggaaatcaatattgtttcactacaaatgataaaaacagatacattaagttatctaaaaaatcgtatttcaaaccctgaggatgcggcagaaatcatgcgttcattcattggaaacagtgaccgagagcatctcattctcatatgtatgaacagtaaaaatgaacctacacatattcaaacactatcgattggatctattaaccaaacggtgattcaccctagagaaatattcaaaacagcgatactcagtaacgcaaatagtataatgctcggtcataatcatccaagtggagatgtattaaccatagtataa

SEQ ID NO: 13 - DNA, 315 bp, artificial
  Centroid sequence
atgaaaagagcttcttattcagtagaaacaaagtataaagcagttgaaatgaaagcagcaggattttcaacaaaagaaattatgaaagaattaaatattagaaataggacgcaagtgaaaacttggtggcgatggtatcgaaatggggaaagttatagattttcacaacaagttggtaaacaatatacctacggtaaaggattagaagagctgtcagaagtagaacaattaaaattagaaaataagagaaaagatatagaattggatattttaaaaaagtacaaggcattggaaaggaagtggtaccaacagtag

SEQ ID NO: 14 - DNA, 696 bp, artificial
  Centroid sequence
atgaaaacaacattattggtcgttgaagatgatgaagcgattttacatttaatcgatgttgcgctaactatgaattattataaagtggttacggcgaagacggggaaagaagcggactttcgcctaagaacagaacaaccagatattatcttattagatttaggcttaccagatattgatggtttatctctcattcagcaattcagagactttgtggacacacctattattgtgattagtgcacgaacagaggaacaaaccattgtcgaagtattagatcgcggtgccaatgattatatgactaagcctttcaatatcgatgagttaagagcacgtatcagagtagcattacgtatgtcacgttctactgagacaattcaaagtcgtttcacaaatggtccattaaccattgatttcgatgcgaaatcagtccttgtcaatgaacagtccgtacatctaacaccgaatgaattccaactcctaacgatattatgccatcatgtcggcaaagtattaacctatcaagtgttattaaaatcactctatggctatgtcaatcatacagaaatggctgccttacgtgtacatatggcctctttacgtaaaaagttgaattatacgcaagacccaaacactgaaaagaaattaatcatcacacatcctagaatcggctaccaaatgcaacacttagaataa

SEQ ID NO: 15 - DNA, 1677 bp, artificial
  Centroid sequence
atgagtattgtgttgtttttgattgtatttatcttgctctcactcattgtgagccgatatttatattcagttgctttaaatgtgccatctaaaatagatgttgtttttaatccgattgagaaattgatttatcaactgattggcacgaaattagaacacatgtctgggaagacgtatatcaaacattttttgttgtttaacggattgatgggcggattgtcctttgtattattgcttattcaacaatggctgtttttgaatcctaaccataatttaaatcaatctgtatcgttagcctttaatactatggcatcttttttgaccaatactaacttacagcattatgcaggtgaaacagatttaagttatttaacacaaatgtgtgtcatcactttcttaatgttcacgtcagcagcgtcaggttacgccgtatgtattgcgatgttaagacgtttgactggaatgacagatgtgattggtaatttctatcaagatattacgcgttttattgtacgggtgctcatacctttcgcattgatcatcagtttgtttttaatcagtcagggcacaccgcaaacgcttaaaggtaatttggtgattgagacattatcaggtgtgaaacaaacgattgcatatggaccgatggcgtctttagaatctattaaacatttagggacaaatggtggtggtttcttaggtgcgaactcttctacaccttttgaaaatccgacatactggtctaattacgctgaagctttaagtatgatgttgattccaggttcattagtctttctattcggtagaatgttgaaaactaaactacagattcatccgcatgcgattatgattttcgttgcgatgtttgtaatgttcatcggctttttagtgacatgtctctattttgaatttgcggggaatccagtgttgcatcacttaggtattgccggtggcaatatggaaggcaaagaaacacgtttcggtattggcttatccgctttatttacaaccattacgaccgcttttactacaggaacagttaacaatatgcacgatagtcttacaccgctaggcggcatggttccaatggtattaatgatgttgaatgcagtttttggcggtgaaggtgttgggctgatgaacatgttgatttatgtcatgttaacggtctttatctgtagtttgatgattgggaaaacaccaagttatttaggaatgaagattgaaggtaaagagatgaaactcattgcgctttctttcttagtacatcctttacttattttggttttttcagcactagcttttattgtgccaggggcatcagatgcgttaactaatccgcaattccacggtgtatcacaagtgttgtatgagtttacatcatcttcagcgaataatggctctggttttgaaggattaggagacaatacggtattttggaacatttcaacaggcattgtgatgttgcttgcacgatatattccaatcgttttacaaattttgattgtatctagtttggtaaataaaaagacctatcagcaacatactcaagatgtaccgattaataatttatttttcagcagtgtattgattatctttattattttgttgagcggcttaacgttcttacctgacttaatgcttggaccaataggcgaacagcttttgctgcacgcatag

SEQ ID NO: 16 - DNA, 558 bp, artificial
  Centroid sequence
atgcagacaataagaaaaagtttaggactagtactgattatgtttgttttatgcggatttatcttcccgctgactgtcacagcgcttggacaagtattatttccagaacaagcaaacggcagtttagtgaaacaagatggcaaagtaattggttcaaagctcattggacaacaatggacagaacctaaatatttccatggacgtatcagtgcagtcaattacaatatgaatgcgaatgaagtgaaagaaagtggcggacctgcttcaggcggctcaaactacggcaattcaaatcctgaattgaaaaaaagagttcaagagactattaaacaagaaggaaaaaaaatttcaagtgatgcggtgaccgcttctggctctggtttagacccagatattacggttgacaatgcgaaacaacaagtaaaacgcattgcgaaagaaagaaacatagatgcttcaaaaattaatcaccttattgatgaaaacaaacaagcatcaccaatggcagatgattatgttaatgtcttaaaattgaatatcactttagataaactctaa

SEQ ID NO: 17 - DNA, 2670 bp, artificial
  Centroid sequence
atggaaagtacatataaaaaaagagggaaacttaccatttatttaggctatagcccaggggtaggtaaaacgtatgaaatgttatcaaatggtattgatcagtatcaagaaggtgcagatattaaaattggttatatcgaaccccatcaacgccctgaaaccaatgcactggttcaacaattgcctgaaatttcgacctccagccgtaaatttggcagccacacctttcactatatagatgtctctaaaatcatagaagctaatccagatgtggtcttaattgatgaactagcacatacaaacatttcaaaagagcgccatttaaaacgttataaggatatagaagaaattctatcgcatggtatcgatgtctggacaacactcaacatccaacatatcgagagtctaagcggacaaattgcgttaatgacaggtattcaagttacagaacgtgtgcccgaccaattcattacgtcagcagatgcctttgaagttgtggatatttcaccaaatatgttgattcagcgccttaaagcaggaaaagtatataaaaaagaacgcttagaaacagccttttctaatttctttacgtatgaaaatctgacagagctgcgtgaacttacactcagaactgtcgcagatattatgagtcaaaaaggacaacaatataaaactaaacataccgacattacaccgcatattgcggtagctatcagcggcagtatttataacgaacgggtcatacgagaagcaagacgtgctgcctataaagaacatgctaaattcacagctgtgtatattgatgtctttgagacaccgtcagaaagcagaaaacaagatcattatgtccataaaaatctaatgctcgccaaagcgttaggtgcagaaatcaaagtgttgtatgcacaagatattgcgaaagcgttaaccgattggtgtgatctcgcttttgtgacgaagctagtccttggacagtcagaacagccacgttggaaagattactttaaacagtcactcattgaacaaattaatcacgtaccacaccatttcaagttagaaattgtaccgattcattatattcattcagacaaacctacaaatacacctaagcaagctcaaaaatcctctcgtttaactgtagagattatgaagatgcttgtaattcaaacgatctgtgtcttgctcggtatatgggtttacaacttagataaaagcgaatccagtgccattatcttgctgatgttctttatcggtattatcgtgctttctatttggacccaatcctatttaatcggattctttgcgtctatcttaaatgtgtttgtttttaattatttctttacggtgccaagattcactttagaaatgtatcgctttgaatatccgattacgtttgcgaccagtatttttgctagtatctttacgagtgccatcttaaagaatttaaaacatcagcattccttaacagaacggcagttatatcggaccaatattatgctgcaatttaaccagtccattaaagaatcttattcaattgaacgcttattaaatattgctggtgatcagattcatcagctactcaatcaggatgtcacggtattcttaattcaaagtaagaaagtcgctgcttccaactcatttggaaacagaagcatttcaagctcagataagacacatgatgctgagacattgagctgggtcattgaaaatgaaagccgtgccggtaaattaaccgatacctttcctggcagtaaatttttgtgtattcccattggcacaaatccagtcaaaggtgtgatttctatccgcttcaccgacgaaacttacatcgacacctatgacaattcaatattagactctatgttgaacgatattaccctggcaatagagaatgtggatctattaaaacaaaccagacaatccatattgaaagctgaacgagaagccacacgttcaaacttcttgcattcaatttcacatgatattagaacaccactgacttccattatgggcaacttagatatgctgaaataccataacgagcatttaaacgatcaacaacaagcagaactcttaactgcttcttatggcgaagcacaatatctgcataccttagtcacaaatattttatctttgactaagttagaaagctctgacattcaaatacaacgcaccccttatttagtagaagaacttctagaagaatttgaagaaggcctcatacgcagacaccaagcaaatcatgtcattattgaaaatgaggatgacgcttcactcattaatatcgacagtaaattaatactgcaagtgctattcaaccttatcgataatgctttaaagcatgcagaatcacattctgaaataaaactgcacgttcaacatgaaacaaacaaaataaaattcgaaatgatagattgcggaaaaggtattccagaagaagaacgtcaattgatttttaatccctattattcaggagacaactttaaagacaataaaaaagatagtttgggattagggctctatttagtacaactcatcttgaaacaacacaacagtgaattagaatatcaaccgaatacaccacaaggcagtattttttatttttatttgactgttaatccaattgaaatggagggagccatggatgaaaacaacattattggtcgttga

SEQ ID NO: 18 - DNA, 2022 bp, artificial
  Centroid sequence
atggctgaaactactaaaatatttgaatcacatttggtcaaacaggctctaaaagacagtgtattgaagctctatcctgtttatatgattaaaaatccgattatgtttgttgtagaagtgggcatgctgcttgccttaggattaaccatttatccggatttatttcaccaagaaagtgtatcacggctatatgtgttcagtatctttatcatattattactgacacttgtctttgcgaacttctctgaagcattagctgaaggtcgcggtaaagcacaagccaacgctttacgccaaacacaaactgaaatgaaggcacgtcgtattaaacaagacggcagttatgaaatgattgacgctagtgacctgaaaaaaggacatatcgtacgtgtcgcgacaggtgaacaaatcccaaatgacggtaaagttattaagggcctcgcaacagtggatgaatctgcgattacaggtgaatctgcacctgtaatcaaagaaagcggtggagatttcgataatgtaattggaggaacttctgtagcttcagactggttagaagttgagattacttcagaaccaggtcattcatttttagataaaatgattggtttggttgaaggggctacaagaaagaaaacacctaatgaaattgcgttatttactttattgatgacattaacgattatcttcttggtcgttattttaacgatgtatccattggcgaaattcctgaatttcaatttatccattgcgatgctgattgctttggctgtgtgtttaattccaacaaccattgggggattattatcggctatagggattgcagggatggatcgtgtgacacagtttaatatcttggctaaaagcggacgttctgtagagacttgtggtgatgtgaatgtcttgattttagataaaacaggtaccattacctacggcaaccgtatggcagatgcgtttattccggtgaaatcatcaagctttgaacgtttagttaaagcggcctatgaaagttctatcgcagatgacacaccagagggacgtagtattgtgaaattagcttataaacaacatatcgacttaccgcaagaggtcggagaatatattccgtttactgctgaaacacgtatgagcggtgtgaaatttacgacacgtgaagtatataaaggtgcaccgaatagtatggttaagcgtgtgaaagaagcagggggacatattccagttgatttagacgctcttgtcaaaggggtgtctaaaaaaggtggcacaccgctggttgtgcttgaagataatgagattttaggtgttatttatttgaaagatgtcattaaagatggactcgtagaacgtttccgtgaattacgtgagatggggattgaaacggtgatgtgtacaggagataacgaattgacagctgcgacaatagcgaaagaagcgggtgtggatcgctttgtggcagagtgtaaacctgaagataaaatcaatgtgattagagaagaacaagcgaaaggtcatattgttgcgatgacgggtgacggtacgaatgacgcgccagctttagcagaagctaatgtaggtttggcaatgaactcaggaaccatgagtgccaaagaagcggcgaatttaattgatttagattctaatccaaccaaactgatggaagtcgttctaattgggaaacaattattaatgacacgtggctcactcactacatttagtattgcgaatgacattgcgaaatactttgcgattttaccagccatgtttatggcggctatgcctgcgatgaatcatttgaatattatgcatctgcattcacctgaatcagcagtattatctgcgttaatctttaatgcgttgattattgtattattgattccgattgcgatgaaaggcgtgaaatttaaaggtgcctcaacgcaaaccatattgatgaaaaatatgttagtttacggcttaggcggtatgatcgtgccatttatcggcattaagctcattgatctcatcatccaactctttgtctaa

SEQ ID NO: 19 - DNA, 78 bp, artificial
  Centroid sequence
attacactattagctgtcgttgtcatcgcattaattttatttttattttacgcattaatttggagtgaaaaattttaa

SEQ ID NO: 20 - DNA, 1086 bp, artificial
  Centroid sequence
gtgaaggttcaaaggatagaagtggagaataagccgtatccattgtatttattactagataaagaataccagctaatagaaccagtaatgaaatttattaaatacttagataatactggtaagtctcctaataccattaaggcatactgctatcatttaaagttgctgtacgagttcatggaacagagaggtgttattcttaatgatattaactttgagttgttagcagacttcgtaggttggttgagatatccttcagcatcaaatgtaattgatcttcagtcaaaaaaagccataagagaagaaacgacagtgaatacaattttaaatgtagttatgagttttcttgattatttaagtagattaggagaatttaaatcaattgatgtatttaaacaagcaaagggaagaaatttcaaaggatttttacatcatgttaataagggtagataccaaaagaatgtcttaaagttaagggttaaaaagaaacagataagaacattgagatcaaaggaagttaagcaaattattgatgcttgtcatacgaaaagagataaattaattttaatgcttatgtatgagggtggtttaagaatcggtgaagtgttatcgcttaggcttgaagatattgtcacttgggacaatcaaatccatttaacacctagagatgttaatgttaatgaagcttatattaaattaaggaaggaaagaacaatacatgtgagtaaagaacttatgtcactttatacagattacttgatatatgagtatagtgaggaattggagcatgattatgtttttatttccttaaaagaaggctattttgggaaaccactaaagtaccaaagtgttcttgatctagttagaagaatagttaaaaggactggaatagaatttacatcacatatgcttcgccacactcacgcaacgcagctaattagggaaggatgggatgttgcgttcgttcaaaagagattaggtcacgcacatgttcagacaacgttaaatacctatgttcatctttcagatcaggatatgaaaaatgagtttaataaatacctcgagagaaaggagcataagaaatga

SEQ ID NO: 21 - DNA, 1893 bp, artificial
  Centroid sequence
atgaatgcttctagtaaaaggaaaattattagtcagagtgagattagcaaaaaaatagctgtaatgaatgaagaaatgcaggggttttgggctaataatagttgggatataagaaaatgtccacatccttctgccatagaattaagtaagaatcctgctttaaggaatcgttgggttcgttttgaacgtgttaaaaatctgtggttaagaacagaattgaaatatttttatttttaccatttaaacaatggaatatggaatgcaaaaactgtctggattagaaaaggaacagtaattaataaaatgttagatttcttagatttaaagtatcctagcattacttcaattactgaagttcctattgaaaaagcaatgacggagtatagaacttatttgacaaaacggggtgttagaattaccactactaattataagattactgctaatcaagaaaaaacacctgtaaaagctaattcctactatgttactaatctaaaacaatttatggagttttatgagaacttttattttgatggagaggagtgggataaagacgtttgggatagacgtaacttacctttgccagatgataaggttaacccaacacaatatgaatatacaattaactttaaagggtttcggaatacatattttaaacaacttgtaaaaagatattgtaagttgagattgaacgtggatagcttttcctatgtaagtgatattgcccaaagacttaaagagttctttaattttctggacatgaaatttaaacaagttcagagagtacaccaattaacgagagtggaaattgaagcatatttaagtgaactaaacatgatgggaataaaacctagtacaataactgggaggatctctatattggaaggactatttagtacccttcttaggctagaatgggatgatgttccttccaaaatattaatttattctgaggactatccgaaaataccaagagcaaaaccacgctttatagatgaattcgtcctagagcaattgaacagtcatcttgataaattacccgaatatatagctacgatgactatgattgttcaagaatgtggaatgaggataagtgaattgtgcaccttgaaaaaaggctgtctattagaggacaaagatggagatttctttttaaagtattatcaatggaaaatgaaaaaggagcatatagttccaatatctaaagaggtagctttacttattaaagttcgggaagataaagtttcagaggaatttccagatagtgaatacctctttccaagaaaagatggatcgccattaaaacaagaaacatttagaggtgagttaaataaattagcttatgagcaaaatatagtggataaatcaggtgagatttatagattccatgcccatgcctttcgccatacagtaggaacaagaatgattaacaacgggatgccccagcatattgtgcagaaatttttggggcatgaaagcccagaaatgacaagcagatacgctcatatctttgatgaaactctaaaaaatgaatttactaaatttcaggaaaaactggttaccaataatggagatgtgcttgatctagatgaagataatgaagtcgatgatgtagagcttcaatggttcaagaaaaatataaatgcacaagtgcttccaaatggttattgtagattgccagtagtagcaggtggttgtccacatgcgaatgcatgcttagattgcactcacttctgtaccagtaagcaattcttaccacagcacgaagaacagttagagcgtacagaagagttattagccatagctaaggataaacaatggcaaagacaagtagagactaatagccgtgttaaagagcgtttagaacaaatcattggaagtttgacggggtaa

SEQ ID NO: 22 - DNA, 732 bp, artificial
  Centroid sequence
atgaaccagaaaaaccctaaagacacgcaaaattttattacttctaaaaagcatgtaaaagaaatattgaatcacacgaatatcagtaaacaagacaacgtaatagaaatcggatcaggaaaaggacattttaccaaagagctagtcaaaatgagtcgatcagttactgctatagaaattgatggaggcttatgtcaagtgactaaagaagcggtaaacccctctgagaatataaaagtgattcaaacggatattctaaaattttccttcccaaaacatataaactataagatatatggtaatattccttataacatcagtacggatattgtcaaaagaattacctttgaaagtcaggctaaatatagctatcttatcgttgagaagggatttgcgaaaagattgcaaaatctgcaacgagctttgggtttactattaatggtggagatggatataaaaatgctcaaaaaagtaccaccactatattttcatcctaagccaagtgtagactctgtattgattgttcttgaacgacatcaaccattgatttcaaagaaggactacaaaaagtatcgatcttttgtttataagtgggtaaaccgtgaatatcgtgttcttttcactaaaaaccaattccgacaggctttgaagcatgcaaatgtcactaatattaataaactatcgaaggaacaatttctttctattttcaatagttacaaattgtttcactaa

SEQ ID NO: 23 - DNA, 783 bp, artificial
  Centroid sequence
atgagcaatttgattaacggaaaaataccaaatcaagcgattcaaacattaaaaatcgtaaaagatttatttggaagttcaatagttggagtatatctatttggttcagcagtaaatggtggtttacgcattaacagcgatgtagatgttctagtcgtcgtgaatcatagtttacctcaattaactcgaaaaaaactaacagaaagactaatgactatatcaggaaagattggaaatacggattctgttagaccacttgaagttacggttataaataggagtgaagttgtcccttggcaatatcctccaaaaagagaatttatatacggtgagtggctcaggggtgaatttgagaatggacaaattcaggaaccaagctatgatcctgatttggctattgttttagcacaagcaagaaagaatagtatttctctatttggtcctgattcttcaagtatacttgtctccgtacctttgacagatattcgaagagcaattaaggattctttgccagaactaattgaggggataaaaggtgatgagcgtaatgtaattttaaccctagctcgaatgtggcaaacagtgactactggtgaaattacctcgaaagatgtcgctgcagaatgggctatacctcttttacctaaagagcatgtaactttactggatatagctagaaaaggctatcggggagagtgtgatgataagtgggaaggactatattcaaaggtgaaagcactcgttaagtatatgaaaaattctatagaaacttctctcaattag

SEQ ID NO: 24 - DNA, 60 bp, artificial
  Centroid sequence
atgggtactttttctatatttgttattaataaagttcgttatcaaccaaatcaaaattaa

SEQ ID NO: 25 - DNA, 687 bp, artificial
  Centroid sequence
ttgaaaattaaagaaatggtaacttcagaaatgccaagagaacgtttgttaagccatggtgcaaaaagtctttcgaatacagaattattagctatattaattaacaccggaagaaaaggattctcgagcatagacattagtaatgaactgcttaaatctgcttcgaatctgaatgaattgaaaaaatcttcaattaacgatttgataaaagttaaagggattggattacaaaaagcaattactttaaaagcagcatttgagttaggggaaaggatggggagaagagctgaaaataatcgtataaaaataacgcaaccaagtgatgttgctgattatatgattccaacaatgaaagatttaacacaagaacattttgtcattttattgttaaattcaaaaaatgtagtgattaaagaaacctgtgtttttaaaggtacattaaatagttcgattgtacatccacgtgaaatttttagtattgcggtgagagaaaatgccaatgcaatcatcgcagttcataatcatccatccggtgatgtaacgccctcacaagaagatatcataacaacaatgaggttgaaggagtgtggtttgattttagggatagatttattggatcatattataatcggtgataatagatttaccagtcttgtagaagcgggttactttgatgaaaatgattga

SEQ ID NO: 26 - DNA, 1017 bp, artificial
  Centroid sequence
atggagaaaattgagaatgaaatagttaataagacatatcttgcaattaattctttggaagaattaagaaatatgattggtattaaatcagactatttttataaatgtctttatgtgaatgaccatttttataatgttatcaaaatacctaaacgaaaaaaagatgaatatagagaattgatgattcctaatatggctctcaaaaatatccaaaggtggattttagataatgtattgtacagaaggcaagttcataaatgtgcaactggttttgttcctaggaaatcaatagtgaacaatgcaatcccacacgttgggcagaaatatatattgaaaatggatatagaaaacttttttccgagtatcacatttaagcaggttagaaaaatattttctgagatgggctataaatttgaacttgcgacagcactcgcaaatttgtgtacagtgaataatcagttgcctcaaggtgcaccaaccagtccatatatagctaatatcatcttttacaatatagataaaagaatcttttcttattgtcaaaaaaataatttgagatatactcgatatgctgatgatattactatttctggatctaataaagtaagttttagtaaagaaattatcagggaaatagtaaaccaatataattttagaattaatgaaagtaagacaattatgtttaaaccaggagacagaaaaaaagttactggtattatagttaatgaaaaaatatcggttcctaaaactttaataagagaggtcaggaagcaaatttattttgtaaataagtttggattagaagaacacttaattcgaaataattattcattggattatgagcagcaatttattatgagtatatatggaaaaatcagttttattaaaatgattgatttcaagaaaggcgttagtttacaaaagaaatttaatgaagtactaggtaatatagaatcgtctaacatgtacagagataatattgactttgatgatatagaactacattggataaattaa

SEQ ID NO: 27 - DNA, 120 bp, artificial
  Centroid sequence
agaagtaaaactagattaggtcatagtgatataaagacgactatggacatttataaacacattacaaaatcatctagagaaaaattggcagatgaatttcaaaaacatattaatttttag

SEQ ID NO: 28 - DNA, 324 bp, artificial
  Centroid sequence
atatcagcctttgactttaattttcaaccgagcatcaatcaacaagatgttttggattttacggatttacgttttataggaaaatatgaaaacatagtctttttagactcaaatgtcgttagtaaaaatagaataagtacttactttattaagtgtcatcatttgaaagagaatttaagaaaagcaaaacttgagaacagcttagaaaatagattgaagcactatagcaagtataagttattaatcattgatgagattgggtacttacctattggaagtgaagctgccaaaatattcttccaaattaatagatttaaggtatga

SEQ ID NO: 29 - DNA, 1230 bp, artificial
  Centroid sequence
atgagtaatacacaaacgaaaaatgtgccagagttgagattcccaggatttgagggcgaatgggaagagaagaagttagggaatcttactaccaaaataggtagtggaaagactcccaaaggtggaagtgaaaactatacaaacaaaggcataccatttttaaggagtcaaaatattagaaatggtaaattaaatcttaatgacttagtttatattagtaaagatatagatgatgagatgaaaaatagtagaacgtactatggtgatgttcttttaaatattacaggagcatcaataggtagaacagccattaattcgatagttgaaacgcatgctaatttaaatcaacatgtatgtattattagattaaaaaaagagtattattataatttttttggacagtatctattatcaagaaaaggtaaaagaaaaattttccttgcacaaagtggaggtagtcgagaaggactaaacttcaaagaaattgctaatttaaaaatcttcaccccaactatatttgaagaacaacaaaaaataggacaattcttcagcaaacttgaccaacaaattgaattagaagaacaaaaacttgaattacttcaacaacagaaaaaatgctatatacagaaaatcttctcacaagaattacgattcaaagatgaagaaggtaattactataaaggatggaacaaaaagcaattaaaagatgtattagaatttagtaataaaagaactattaatgaaaatgaatatcctgttttaacatcgtcaagacaaggtttaatacttcagtcagactactataaagataggaaaacttttgcagagagtaatattgggtatttcatactccctaaaaatcatataacataccgttcaagaagcgacgatggaatttttaagtttaatttaaatctaatgattgatgtaggtattattagtaaatattaccctgtctttaaagggatagatgcaaatcaatattatttaacattacacttaaactatcaactgaaaaaagaatatattaaatatgcaactggtacatcacaattggtactctcacaaaaagacttgcaaaacataaagactaaattgccatcttatgaagaacaacaaaaaatcggtgattttttcagtgaaatagatagattggttgaaaaacaatcttcaaaagtcggacgattaaaagtacgtaaaaaagaactattacaaaaaatgtttgtttaa

SEQ ID NO: 30 - DNA, 582 bp, artificial
  Centroid sequence
atgaatacaaaatttttaggtaaaacattagtagcaagtgctttagtattaacaacattaggaacaggtttacattcttcatacttaggattaaatacaaataaagttgttaaaacagcaaaagcagaagaaaaaatgacaaatggtcaattgtggaaaaaagttaaagattcattaattgattcaaatattattagtggtaacgaaaatgaagagattacagtaacatatgttaataaaaccggatattcttcaagtgtttctgcctatggtaataataatgacgatttttcaagtactccaagtaatttttctaaacttaaggaaattgacttgaaaaaagataatgtaccgtcagatgattttaatactactgttagtggtgaagatagttggaaaacacttacatctaaattaaaggaaaaaggtttggttacagatggacaaacagtaactattcattgtaatgataagtctgacaatacaaaatcatctgtttcaggtaaagtaggagcagatctgacaagtggcaatggaactacattcaaaaaacgctttattgataaaatcacaattgattaa

SEQ ID NO: 31 - DNA, 1884 bp, artificial
  Centroid sequence
atgaaaaagcaaataatttcgctaggcgcattagcagttgcatctagcttatttacatgggataacaaagcagatgcgatagtaacaaaggattatagcgggaaatcacaagttaatgctgggagtaaaaatgggacaccgatttctaatggttacttttgggggaaaatcgatagtctagaatcacaattttctaaagcattagcaataattgaagagtatcaatatggtgagaaagaatataaagatgcaaaagataagtttatggatagaattttgtcagaagatcaatatcttttggagaaaaagaaagctctgtatgagaaatataaagagtggtataaaaagcacaaagagataaacccaacttatccaaaaatgcaaacattccatgaatttagtgtatataatctaactatggaagaatacaatgagatttctaaatctttgaaagatgcggaagaagagtttcgtaaaaatgtaagcgaagttcaagagaaagaagtcaaattaaaaacatatagcgaagatgaagaagaaaaggcaactaaagaagtatacgatcttgtagccgaagttgatactatatatgtatcttattttggacatgataaacatggtcaaagtgctaaagaattgcgtgcgaaattagatttaataattggagaggaaaaaaacgcctttcgtattactaatgaacgtataaaaaatgaaatgatttatgacttgaattctattattgacgatttctttatggaaactaaccaaaatagaccggaaaatataacaaaatttgattgggataagcatgattatagaaataaactagaaaacaaagcacattttgaggctctagttgaagaaacgaaaaaagcagttaaagaagcagatgcatcttggaaaaagaaaactgtcaaaaattacgatgaatctgtaacaaaagcacatgttgtaaaagaagagaagaaagttgaagaacctcaatcacctaaagttgataaccaacaagatgacaaagcaacacaaccagtggcacagccattagtaaaaattccacaagggacaatctatggtgaaactgtaaaaggtccggaatatccaacgatggaaaataaaacgttacaaggtgaaatcgttcaaggtcctgatttcccaacaatggaacaaaacagaccatcattaagcgataattatactcaaccatcgttaacgaaccctattttagaaggtcttgaaggtagctcatctaaacttgaaataaaaccacaaggtactgaatcaacgttgaaaggtattcaaggagaatcaagtgatattgaagttaaacctcaagcaactgaaacaacagaagcttctcaatatggtccgagaccgcaatttaacaaaacacctaagtatgtgaaatatagagatgctggtacaggtatccgtgaatacaacgatggaacatttggatatgaagcgagaccaagattcaataagccatcagaaacaaatgcatacaacgtaacgacaaatcaagatggcacagtatcatatggcgctcgcccgacacaaaacaagccaagcaaaacaaacgcatataacgtaacaacacatgcaaacggccaagtatcatacggtgctcgcccgacacaaaacaagccaagcaaaacaaacgagtataacgtaacaacacatgcaaatggccaagtatcatatggtgctcgtccgacatacaagaagccaagtgaaacgaacgcatataacgtaacaacacatgcaaacggtcaagtatcatacggcgctcgccctacacaaaacaagccaagtaaaacaaatgcatacaatgtaacaacacatgcagatggtactgcgacatatggctctagagtaacaaaataa

SEQ ID NO: 32 - DNA, 1212 bp, artificial
  Centroid sequence
atgagtaatacacaaaagaaaaatgtgccagagttgagattcccagggtttgaaggcgaatgggaagagaagcagttgggggatcttacagatagagtaattaggaaaaataaaaacttagaatcgaaaaagcctttaacaatatccggacagttaggtttaattgatcaaacagaatattttagtaaatcagtttcgtcgaaaaatctagaaaattatacactaataaagaatggagaattcgcgtataacaaaagttattctaatggatacccattaggggctattaaaagattaactagatatgatagtggtgtattgtcctctttgtatatttgtttttctattaaaagtgaaatgtctaaagacttcatggaagcatattttgattcgacacactggtatagagaagtttctggaattgcagttgagggtgcaagaaatcacggattattaaatgtttctgtgaatgatttttttactattctaattaaatatccaagtttagaagaacagcaaaaaataggcaagttcttcagcaaactcgaccgacaaattgaattagaagaacaaaagcttgaattacttcaacaacagaaaaaaggctatatgcagaaaattttctcacaggaactgcgattcaaagatgagaatggtgaagattatccagattgggaaaatagcaaaatagaaaaatatttaaaagagagaaacgaacgttctgacaaagggcaaatgctttcagtaactataaatagtggcattataaaatttagtgaattggatagaaaagataattcaagtaaagataaaagtaattataaagtagttaggaaaaatgatattgcatataattctatgagaatgtggcaaggggctagtggtaaatcaaattataatgggattgttagccctgcatatactgtgctttatccaacacaaaatactagctcattatttattggatataagtttaaaacacatagaatgattcataaatttaaaattaattcacaaggattaacatcagatacatggaacttaaaatataaacaattaaaaaatataaatatagatatacctgtattggaggaacaagaaaagataggtgatttctttaaaaaaatggatatattgataagtaaacagaaaatgaaaattgaaatattagaaaaagagaaacaatcctttttacaaaaaatgttcttataa

SEQ ID NO: 33 - DNA, 378 bp, artificial
  Centroid sequence
atggataaacaagttagaaatacaacagaaattgtacgtttggcgaagcagaaatcaaaaaagacaagggaaaaagtagacaaagcgatttctaaattttcgattgaaggtaaagttattaattttaattcaatagcaaaggaagctaatgtttctaaatcatggctttataaggaacacgatattaggcaaagaatcgaatcccttcgtgagcgtcaaataacagcaaatgtagtctcaaaacccaagaaaagttctcgttcggaggaaatccttattaaaaccttaaaaagaagagtaatggaattagaaaaagaaaataaaaaattacagaaccaaattcaaaaattatatggagatctgtataataaagaataa

SEQ ID NO: 34 - DNA, 442 bp, artificial
  Centroid sequence
agagaaagaagaagttccaggtaaaccaggaattaagaatccagaaacaggagacgtagttagaccaccggtcgatagcgtaacaaaatatggacctgtaaaaggagactcgattgtagaaaaagaagaaattccattcgagaaagaacgtaaatttaatcctgatttagcaccagggacagaaaaagtaacaagagaaggacaaaaaggtgagaagacaataacgacaccaacactaaaaaatccattaactggagaaattattagtaaaggtgaatcgaaagaagagatcacaaaagatccgattaatgaattaacagaatacggacctgaaacgatagcccaggtcatcgagacgaatttgatccgaagttaccaacaggagagaaagaagaagttccaggtaaaccaggaattaagaatccagaaacaggagacgtag

SEQ ID NO: 35 - DNA, 156 bp, artificial
  Centroid sequence
gtgaatgtaagaaactcatataaagtgaaacataaatatttgaaagtcaaccgctctaatatgattacatataagtccaatcaatattcagcatcagctgaatattgtgggaaaacagttgaagttcaagtttatgatcaaaaacaacacgtttaa

SEQ ID NO: 36 - DNA, 684 bp, artificial
  Centroid sequence
atgaaattaaaaaatattactaaagcaagtttagcactagggattttaacaacagggatgattacaactactgctcagccagtaaaagcaagtacattagaggctagatcacaagcgactcaagatttaaaagattattataatagaccttattttgacttaagaaatctaagtggttatagagaaggaaatacagttacatttataaatcattaccagcaaacggatgtaaaattagaaggcaaagataaagacaaaattaaagatggaaataatgataatttagatgtgtttgtcgttcgtgaaggatttggtagacaagcagataataattcaataggtggaattacaaagacaaatgggactcaacataaagatactgttcaaaacgttaatttgttagtttataagagtacaggtcaaaacactacttctgtgacttcaacaaactatagcatctataaagaggaaatttcattaaaagaacttgatttcaaattaagaaagcacttaattgacaataacggtttatataatactgagcctaaagatagcaaaataaaagtgactatgcaaaatggtgatttttatacttttgaattgaataaaaagttacaaacacaccgtatgggtgatgtgattgatggtactaaaataaaagaaattaatgttgaattaaactaa

SEQ ID NO: 37 - DNA, 684 bp, artificial
  Centroid sequence
atgaaattaaaaaatattgctaaagcaagtttagcactagggattttaacaacaggtatgattacaactactgctcagccagtaaaagcaagtacattagaggttagatcacaagctactcaagacttgagtgaatattataaagggagaggatttgaattaacaaatgtaacaggatataaatacggaaataaagttacatttatagataattctcaacaaattgatgttacattgacaggaaatgaaaaattaactgttaaagatgatgacgaagtttctaatgttgacgtgtttgtagtaagagaaggtagtgacaaatcagctatcacaacatcgattggtggaattacaaagacaaatgggactcaacataaagatactgttcaaaacgttaatttgtcagtttctaagagtacaggtcaacacactacttctgtgacttcagaatactatagcatctataaagaagaaatctcattaaaagaacttgattttaaattaagaaagcatttaattgataaacatgatctttataagacagaacctaaagacagtaaaattagaattactatgaaaaacggtggctattatacatttgaattaaataaaaaattacagcctcatcgcatgggtgatacgattgatagtagaaatatagagaaaattgaagtgaatttataa

SEQ ID NO: 38 - DNA, 1977 bp, artificial
  Centroid sequence
atgaaaaagcaaataatttcgctaggcgcattagcagttgcatctagcttatttacatgggataacaaagcagatgcgatagtaacaaaggattatagtaaagaatcaagagtgaatgagaacagtaaaaagggagctactgtttcagattattactattggaaaataattgatagtttagaggcacaatttactggagcaatagacttattggaagattataaatatggagattctatctataaagaagcgaaagatagattgatgacaagagtattaggagaagaccagtatttattaaagaaaaagatagatgaatatgagctttataaaaagtggtataaaagttcaaataagaacactaatatgcttactttccataaatataatctttacaatttaacaatgaatgaatataacgatatttttaactctttgaaagatgcagtttatcaatttaataaagaagttaaagaaatagagcataaaaatgttgacttgaagcagtttgataaagatggagaagacaaggcaactaaagaagtttatgaccttgtttctgaaattgatacattagttgtaacttattatgctgataaggattatggggagcacgcgaaagagttacgagcaaaactggacttaatccttggagatacagacaatccacataaagttacaaatgagcgtataaaaaaagaaatgatcgatgacttaaattcaattattgatgatttctttatggagactaaacaaaatagaccgaattctataacaaaatatgatccaacaaaacacaattttaaagagaagagtgaaaataaacctaattttgataaattagttgaagaaacaaaaaaagcagttaaagaagcagacgaatcttggaaaaataaaactgtcaaaaaatacgaggaaactgtaacaaaatctcctattgtaaaagaagagaagaaagttaaagaacctcaattacctaaagttggaaaccaacaagaagttaaaactactgctggtaaagctgatgaaacaacacaaccagtggcacagccattagtaaaaattccacaaggaacaatctatggtgaaactgtaaaaggtccagactatccaactatggaaaataaaacgttacaaggtgaaatcgttcaaggtcctgatttcccaacaatggaacaaaacagaccatctttaagtaataattatacaaacccaacgttaacgaaccctattttagaaggtcttgaaggtagctcatctaaacttgaaataaaaccacaaggtactgaatcaacgttgaaaggtattcaaggagaatcaagtgatattgaggttaaacctcaagcatctgaaacaacagaagcatcacattatccagcgagacctcaatttaacaaaacacctaaatatgttaaatatagagatgctggtacaggtatccgtgaatacaacgatggaacatttggatatgaagcgagaccaagattcaataagccaagtgaaacaaacgcatacaacgtaacaacacacggaaatggccaagtatcatacggcgctcgcccgacacaaaacaagccaagtaaaacaaacgcatataacgtaacaacacatgcaaacggccaagtatcatatggcgctcgtccgacacaaaacaagccaagcaaaacgaatgcatataacgtaacaacacacggaaatggccaagtatcatatggtgctcgcccaacacaaaacaaaccaagtaaaacaaatgcatataacgtaacaacacatgcaaacggccaagtatcatatggcgctcgcccgacacaaaacaagccaagcaaaacaaacgagtataatgtaacaacacatgcaaacggccaagtatcatatggagctcgtccgacatacaagaagccaagcgaaacaaatgcatacaatgtaacaacacatgcagatggtactgcgacatatgggcctagagtaacaaaataa

SEQ ID NO: 39 - DNA, 2427 bp, artificial
  Centroid sequence
atgtcaatgacaaataaaatgaagaaatggcaaaaattatccaccattacgttattaatgaccggagtgattgctttaaataatggtgaatttagaaatgttgataaacatcaaatcgctgtggctgatacgaatgttcaaacgccagattatgaaaaattgaagaagacgtggctcgacgttaactacggttatgatcagtatgatgagaataatcaagatatgaagaagaagtttgatgctaaagaaaaagaagccaagaagttacttgatgacatgaaaactgatacgaatagaacatatttgtggtcaggagctgaaaaccttgaaactaattcttctcacatgacaaaaacctatcgtaatatcgagaaaatcgcagaagcaatgcaacataagaatacggtattaaaaacagttgaaaacaagttgaaaataaaagaagccctagattggatgcacaaaaatgtttatggcaagaatccttctcaaaaagtcgaggatttaactaaaaatcgtaaggggcaaactacacccaagaataactcattgaattggtgggattatgaaattggtacgccaagagcattaacaaatacactacttctaatggatgatatgctcactaaagatgaaatgaaaaattattcaaaacctattagtacatatgcaccatccagtgacaaaattttatcttctgttggtgaatcagaagatgctaaaggtggaaatttagtggacatttctaaagtaaaacttttagaaagtgttattgaagaagatgtagatatgttgaaaaagtctatagattcttttaataaagtgttcacttatgttcaagattctgccactggtaaaggtcgcaatggattctataaagatggctcttacattgatcatcaagatgtcccttacactggtgcttatggtgttgtactattagagggtatttctcaaatgatgccgatgataaaagaatctccttttaaaactacacaagataatgctacattaagcaattggattgacgaagggtttatgccattaatctataaaggtgaaatgatggatttatcacgaggtagagctatcagtcgtgaaaatgaaacgagtcatacagcgtcagcgactgtaatgaaatcattgttgagattgaatgataccatggatgattcaacaaaaactagatataagcaaatcgttaaaacttctgttaattctgattcaagttacaaccaaaataattatttaaattcatattcagacatagctaaaatgaaaaagttaatgaatgatagtactatttctaaaaacgatttaacacagcaacttaaaatatataatgacatggatcgtgtcacctatcacaataaagacctggactttgcatttggtttaagtatgacatcgaaaaacatcgcacgatacgaaaatatcaacggagagaacttaaaaggttggcacaccggtgcaggcatgtcttatttatataacagcgatgtcaaacactatcgcgataacttctgggcaacagccgatatgacttgtcttccaggcactactactttaaatgatatgccatctactaatactaagaatgataaatcttttgttggcgggacaaaattaaataataaatacgcaagcatcggtatggattttgaaaatcaggacaaaactttaactgccaaaaaatcatatttcatattaaacgataaaattgtcttcttaggaactggcattaaaagtactgattcatcaaagaatccagttacaagtgttgaaaatcgcaaagcaaatgggtataaattatttaaagatgatattgaaattaccacttcagatgttaatgctcaggaaacccattcagtctttttagagtccaacgatactaaaaagaacattggttatcatttcttagacaagccaaaaataactgtaaaaaaagaaagtcatactggtaagtggagtgaaattaataaaagtcaaaaaaaagatgacaaaaaagatgagtattatgaagtaactcaaacacataatacatctgacagtaaatatgcatatgttttgtatcctggtttatcaaaaagtgattttaaatcgaagaataataatgtaagtattgttaaacaagatgaagattttcatgtgataaaagataatgatggcgtatttgctggggttaattatagtgataatactaaatcttttgatataaacggaattactgttgaattaaaagaaaaaggcatgtttgtaattaaaaagaaagatgataaagcatataaatgtagcttctataatcctgaaactacaaataccgcttcaaatatagaatcaaaaatttttattaaaggttacaccataactaataaaagtgtcacaaactctaatgatgctggtgtaaactttgaattaactaaataa

SEQ ID NO: 40 - DNA, 1077 bp, artificial
  Centroid sequence
atgacaaaaatttttaaaatatcatttttgattttgttagtagtaattgtttctagttattatggtgaaagttttgtcttagctgataataatcctatcgtcaattcagaaaatggtagtgataataattttgaatcaggaacaattgaacgtaatcaaaatgagctttatgaagtaggtgattatagtacgcccttaactgagcgagttttcggtaaagatcaaagaacggttgttaataatattttacaaagaccttataagcagactgtattattaaatatgacgttttcaaataaccgtgtatataaaggcaccggtactatgattggtaaggacattgtattgacagcggctcataatgtctattctaaagacgataagggttgggctaaaaagattgatgtctatgctggagtaaatgggcaaacatatacaataggaaaggccttttcgcataagttttttgtatctaaaacttggattaataatgctcctacaaaagaagatatagcaattattaagttaaatagtaatttaggaaataaaacaggttacttaactttgaacacacacattagcaaaggtgaaaatattgaaatttctggatttccaggagacaagtcagacaacagacaatataaaggtaaagggaaattagaaagttttgatgagaatgaaatgtattatacggtagacacattttcaggacaaagtggtagtgcgataagagattcaaaaaacaatatcatcggagtacatgcatacggcagatataatcataattcaggcgtgagaataaatgatttaaaattagattacataaattattggataggtaagtatagaagtcatccatataataagaaagtgaaagtaattaaaagtaagtatatatattggaaaaacattgaaattacaaaaaagggtgataataaattaattaaaaaagataaagcgtacacagctaaactctattacaatattccaaatgggtataaatattactctttatacgacgaaaaaaatagatggatgggttactttaatagcaatgatattaaggtagtaaaatag

SEQ ID NO: 41 - DNA, 1503 bp, artificial
  Centroid sequence
ttgaaaaataaattgctagttttatcattgggagcattatgtgtatcacaaatttgggaaagtaatcatgcgagtgcagtggtttctggggagaagaatccatatgtatcaaaagctttagaattgaaagataaaagtaataaatccaattcttacgaaaattatagagatagtttagaaagtttgatttcatcattatcttttgctgattatgaaaaatatgaagagccagaatatgaaaaggctgtaaaaaaatatcaacaaaaatttatggctgaagatgatgcattaaaaaattttttaaatgaagaaaagaagataaaaaatgcagatattagcagaaaatcgaatgatttattaggtttaacacatgaaagatattcttatatttttgatacattaaagaaaaataaacaagagtttttaaaagatattgaagaaatacaactgaaaaatagtgatttaaaggactttaacaatacagagcaacataatgccgacgtagaaataaacaatttagaaaataaagtattaatggtagggtatacattctataatacaaataaggacgaagttgaagaattatatagtgagttagatttgattgttggagaagttcaagataagtcggataaaaaaagagcagtaaatcaaaggatgttaaatagaaaaaaagaggatttagaatttattatagataaattttttaaaaaaattcaacaagaacgtccagagagtataccagcattaactagtgaaaaaaatcataatcagactatggcattaaagttaaaagcagatacagaagctgctaaaaatgacgtatcaaaaagaagtaaaagaagtttaaatactcaaaataataaatctacaacacaagaaatttctgaagaacaaaaagctgaatatcaaagaaagtcagaggcattaaaagaaagatttataaacagacaaaaatctaaaaatgagtctgtggtttcactaatcgatgacgaagacgacaacgaaaacgacaggcaacttgtggtttctgcgccatcaaagaaaccaacaacaccgactacatatactgaaacaacgactcaggtaccaatgcctacagttgagcgtcaaactcagcaacaaatcgtttacaaaacaccaaaaccattagctggattaaatggtgaaagtcatgatttcacaacaacgcatcaatcaccaacaacttcaaatcatacgcataataatgttgttgaatttgaagaaacgtctgctttacctggtagaaaatcaggatcactggttggtataagtcaaattgattcttctcatctaactgaacgtgagaagcgtgtaatcaagcgtgaacacgttagagaagctcaaaagttagttgataattataaagatacacatagttataaagaccgattaaatgcacaacaaaaagtaaatactttaagtgaaggtcatcaaaaacgttttaataaacaaatcaataaagtatacaatggcaaataa

SEQ ID NO: 42 - DNA, 921 bp, artificial
  Centroid sequence
atgacgaatgaattactattaaaaaacaataaaatgggcgacaacgttctatctagagttaagacattagaagcacaaggagatttacagtttcctgcaaactattcgcctgagaatgcaatgaagtcagcaatgttacaactgcaagaattaaaaggatctaaaaaagatggttataaaccagcgctggaatttgcaacttcaaccagcatagcaaacgccttaatggacatggttgtacaaggtttaaatcctgctaagaatcaaggctatttcattatgtatggcgataaggttcaattccaaagaagttaccacggaacaatggcagtaactaaacgtgtagcaggcgcagaagaaattaatgcagaagtcatatttgaaggtgacgaagttaagtataaaactaaaaacggaaaaattgttgaacttgaacatacacagtcttttggtaacagaaacacacaaaacattatcggtgcatatgcaacagttgtatttaaagatgaaagtagaaattacactgaaatcatgacatttgaagagattgaagaagcgtggaagcaatcacaaatggtttataacggtgtatttaaagaagacggtacacacagaagattccctcaagaaatggctaaaaagactgtaataaaccgtgcatgtaaaaagattttaaacagcacggatgacgctagtcttttatcaaatcaaattaaagaatctgaacaacgtcaacgcaaagaagtattggatgcagaagttgaagaaaatgcaaatcaagaacaattggattttgaaccaccagtttttgaagaagcacaatacacagaattagaaaatgaaaaacctattgatgtatctgactttgaagaaataaaagaacctgcaacagaaaaagaaagcgaagaagagccattttaa

SEQ ID NO: 43 - DNA, 723 bp, artificial
  Centroid sequence
atgctagttttaaataatcttcaaaaaaaatttactaattcaaaaatggttttgaataatgtgaatgctaagtttagaagtgggagcatcaattgcatagtgggagtaaatggggcaggtaaaacgactttgttaaatattattagtagtatattgatgccaacaaaaggtgatgtatatttaaatagtgaaagtatttttgaaaatagcacactaaaaaaagagattttttacacaccagtaaatccctttttttatgaaaatttaagtgctaaagataatttgtacttaatatgtagcctatataatcggaaaatagatcaaataactattgagaaaactattaaagatgtaggtttgaatatagaagatctaaatatacctgtatataatttttcaagtggtatgaagcaaaaactaaattttgcttctatgttattagtagattcaaatgttttattattagatgaaccatttaatgcccttgaccatgttgctcaaaaaaatttcacacgaattttaaagggattagtttctaaagaaaagataataattttcactagtcatttgcctaatacaattttagaactctcagaaaatatttatttgttaaaagatggatgttttacagataaacgaaaagcacagtcatttaatcaaaccacgttagaaacatggttgttagaaagtcaaaaagaggtgataccttatgaagaaaaatga

SEQ ID NO: 44 - DNA, 681 bp, artificial
  Centroid sequence
atgatagaattaaagaatgtttataggacttttaaaaacggtgataaaaatattcgagttttaaaagacattaatatacatatcaatgcaggtgaattcatagcgattatgggaccatcaggctcagggaagagcacactgattaatatcttaggatttatagatcgagagtatcatggtgaatatttgtttgaaggaagtaattatcagacacaatctgataatcaattggcaaacataagaaataaaacagttggatttgtttttcaaaattttaaactaattcataataatactattttagaaaatataagtatgccactggtatatacaaatatgaatacgatagaacgaaagaataaagttatgactgtgctcagtgctgtaggcctagatggcaaaggtgattttactcctagtaaactatcaggcggtcaacaacaacgtgttgcaattgcgcgagccattataaataatccaaagtttattattgcagatgagccaacgggtgctttggattcagatacatctaaaattattatggacatatttacatcattaaaccgagataatcatactacaattattttagtcacacatgatcgtaaagtagcagaaaaagctgatcgaataattcatattttggatggtcgtatacaacatgaagaggtgattaaatga

SEQ ID NO: 45 - DNA, 198 bp, artificial
  Centroid sequence
gtgaaaaataatttgaaaatagctagagtttcactatctatgactcaaaaggagctagcaaataaagttggagtaactagacaaacaatatctcttatagaaaagggtgtacataacccctctctatcactatgtaaaaatatttgttcggtgttgaataaaaatttggatgagatatttggagagaaaccacaataa

SEQ ID NO: 46 - DNA, 777 bp, artificial
  Centroid sequence
atgaaaaaatttaacattcttattgcattactcttttttactagtttggtaatatctcctttaaacgttaaagccaatgaaaacattgattcagtaaaagagaaagaattgcataaaaaatctgaattaagtagtaccgcgctaaataatatgaaacattcttatgcagataaaaatccaataataggagaaaataaaagtacaggagatcaatttttagaaaatactttgctttacaaaaaattttttactgaccttatcaattttgaagatttattaataaacttcaattcaaaagaaatggctcaacatttcaaatctaaaaatgtagatgtttacgctataagatatagcattaattgttatggtggtgaaatagataggactgcttgtacatatggaggtgtcactccacacgaaggtaataaattaaaagaacgaaaaaaaatacccatcaatttgtggataaatggtgtacaaaaagaagtttctttagataaagttcaaacagataaaaaaaatgttaccgtacaagaattagatgcacaagcaaggcgctatttgcaaaaggatttaaaattgtataataatgatactctcggaggaaaaatacagcgcggaaaaatagagtttgattcttctgatgggtctaaagtctcttatgatttatttgatgttaagggtgattttcccgaaaaacaattacgaatatacagtgataataaaacattatccacagagcaccttcatattgacatctatttatatgaaaagtag

SEQ ID NO: 47 - DNA, 789 bp, artificial
  Centroid sequence
atgatgggatattcaaaaaggtttgcattgtacataagcgttatgattttaatatttgcgatagcaggttgtggcaaaagtgatgaaacaaaagaaggttccaaagaagaacaaattaaaaagagctttgcgaaaacgttagatatgtacccaattaagaatctcgaggacttatatgacaaagaaggatatcgagatggcgaatttaaaaagggtgacaaagggacatgggttatcagttcagtaatggttaaacagccaaaaggtgaaattatgaaatcaagagggatgtatctatttttaaatagaaatacaagaaccgcaaaaggatattttattgtagatgaaacaagtaatgatactttaaaaaaaacagaggataaagaaaaacgttatccagtaaagatggtgaataataaaatagtacctattgatccaattaatgataaaggtgtaaaaaaagaaatagaaaattttaagtttttctcacaatatggtgattttaaagaattaaaaaattataaaaatggagaggtttcatacaattctgaagcccctatctactcagcaaaatatcaactgaaaaataatgattataatgtaaagcaattacgtaaaagatatgatatatcaacagaaaaggctcccaaattgttgttgaaaggtactggagatttaaaaggttcatcaatcggacataaggacattgagtttacattcgtggagaatcaagaagagaatatattttttactgatagtttggagtttacctcaagtgagaactattag

SEQ ID NO: 48 - DNA, 564 bp, artificial
  Centroid sequence
ttgaattattttgataacaaaattgaccagtttgccacgtatcttcaaaagagaaataacttagatcatattcaatttttgcaagtacgtttagggatgcaaattatagttggtaatttttttaaaatacttgtaacatatagtatttctatattcttaagtgtatttttgtttaccttagttacacacttatcctatatgttaatacgctataatgcacatggtgctcatgcaaagtcttcgatactttgttacatacaaagtattttaacatttgtatttgtaccttattttctaattaatatagacattaattttacttatttactggccttatctattataggattgatttccgttgttatttatgcacctgcagcaacgaaaaagcaacctataccaataaaattagtaaaacgtaaaaagtatttatctataattatgtatttattagttttgattctatccttaataatacatccattttatgctcaatttatgttattaggaattttagtggaatctattacattattacctatttttttccctaaggaggattaa

SEQ ID NO: 49 - DNA, 780 bp, artificial
  Centroid sequence
atgttaaataaaatcttacttttattgctctctgttacttttatgttgttatttttctctttacattcagtaagtgctaaaccagatccaagacctggagaattgaatagagttagtgattataaaaaaaacaaaggtactatggggaatgttgaatccttatataaggataaagcggtaatagcagaaaatgttaaaaatactagacaattcttaggacatgatttgatttttcctattccttattcagaatacaaagaagttaaaagtgaatttataaataaaaaaacagctgataaatttaaagacaaacggttagatgtgtttggaataccctatttttatacatgtttagtacctaagaatgaatcaagagaagaatttatttttgatggagtttgcatatacgggggcgttacaatgcactccacagctgatagtatatccaaaaatataattgttccagttactgtagataataaacaacagttctcttttacaattagtacaaataaaaaaacggttacggtacaagagctagattataaagtaaggaattggttgactaacaataaaaaattatatgaatttgatgggtcggcatatgagacgggttatatcaaatttattgaagaaaataaagatagtttttggtacgatttgtttcctaaaaaggatttggttccctttataccttataaatttgtaaatatttatggagataataaaactatagatgcttcgagtgttaagatagaagttcacctgactacaacgtga

SEQ ID NO: 50 - DNA, 565 bp, artificial
  Centroid sequence
acgtggtgtaaacgttcatcattcaacggtctaccgttgggttcaagaatatgccccaattttatatcaaatttggaagaaaaagcataaaaaagctaattacaaatggcgtattgatgagacgtacatcaaaataaaaggaaaatggagctatttatatcgtgccattgatgcagagggatatacattagatatttggttgcgtaagcaacgagataatcattcagcatatgcgtttatcaaacgtctcattaaacaatttggtaaacctcaaaaggtaattacagatcaggcaccttcaacgaaggtagcaatggctaaagtaattaaaggttttaaacttaaacctgactgtcattgtacatcgaaatatctgaataaccttattgagcaagatcaccgtcatattaaagtaagaaagacaaggtatcaaagtatcaatatagcaaagaatactttaaaaggtattgaatgtatttacgctctatataaaaagaaccgcaggtctcttcagatctatggattttcgccatgcaacgaaattagcatcatgctagcaagttaa

SEQ ID NO: 51 - DNA, 831 bp, artificial
  Centroid sequence
atgaaaaacacaatacatatcaacttcgctatttttttaataattgcaaatattatctacagcagcgccagtgcatcaacagatatctctactgttgcatctccattatttgaaggaactgaaggttgttttttactttacgatgcatccacaaacgctgaaattgctcaattcaataaagcaaagtgtgcaacgcaaatggcaccagattcaactttcaagatcgcattatcacttatggcatttgatgcggaaataatagatcagaaaaccatattcaaatgggataaaacccccaaaggaatggagatctggaacagcaatcatacaccaaagacgtggatgcaattttctgttgtttgggtttcgcaagaaataacccaaaaaattggattaaataaaatcaagaattatctcaaagattttgattatggaaatcaagacttctctggagataaagaaagaaacaacggattaacagaagcatggctcgaaagtagcttaaaaatttcaccagaagaacaaattcaattcctgcgtaaaattattaatcacaatctcccagttaaaaactcagccatagaaaacaccatagagaacatgtatctacaagatctggataatagtacaaaactgtatgggaaaactggtgcaggattcacagcaaatagaaccttacaaaacggatggtttgaagggtttattataagcaaatcaggacataaatatgtttttgtgtccgcacttacaggaaacttggggtcgaatttaacatcaagcataaaagccaagaaaaatgcgatcaccattctaaacacactaaatttataa

SEQ ID NO: 52 - DNA, 561 bp, artificial
  Centroid sequence
atgactggacagcgcattgggtatatcagggtcagcaccttcgaccagaacccggaacggcaactggaaggcgtcaaggttgatcgcgcttttagcgacaaggcatccggcaaggatgtcaagcgtccgcaactggaagcgctgataagcttcgcccgcaccggcgacaccgtggtggtgcatagcatggatcgcctggcgcgcaatctcgatgatttgcgccggatcgtgcaaacgctgacacaacgcggcgtgcatatcgaattcgtcaaggaacacctcagttttactggcgaagactctccgatggcgaacctgatgctctcggtgatgggcgcgttcgccgagttcgagcgcgccctgatccgcgagcgtcagcgcgagggtattgcgctcgccaagcaacgcggggcttaccgtggcaggaagaaatccctgtcgtctgagcgtattgccgaactgcgccaacgtgtcgaggctggcgagcaaaagaccaagcttgctcgtgaattcggaatcagtcgcgaaaccctgtatcaatacttgagaacggatcagtaa

SEQ ID NO: 53 - DNA, 2967 bp, artificial
  Centroid sequence
atgccacgtcgttccatcctgtccgccgccgagcgggaaagcctgctggcgttgccggactccaaggacgacctgatccgacattacacattcaacgataccgacctctcgatcatccgacagcggcgcgggccagccaatcggctgggcttcgcggtgcagctctgttacctgcgctttcccggcgtcatcctgggcgtcgatgaactaccgttcccgcccttgttgaagctggtcgccgaccagctcaaggtcggcgtcgaaagctggaacgagtacggccagcgggagcagacccggcgcgagcacctgagcgagctgcaaaccgtgttcggtttccggcccttcaccatgagccattaccggcaggccgtccagatgctgaccgagctggcgatgcaaaccgacaaaggcatcgtgctggccagcgccttgatcgggcacctgcggcggcagtcggtcattctgcccgccctcaacgccgtcgagcgggcgagtgccgaggcgatcacccgtgctaaccggcgcatctacgacgccttggccgaaccactggcggacgcgcatcgccgccgcctcgacgatctgctcaagcgccgggacaacggcaagacgacctggttggcttggttgcgccagtctccggccaagccaaattcgcggcatatgctggaacacatcgaacgcctcaaggcatggcaggcactcgatctgcctaccggcatcgagcggctggttcaccagaaccgcctgctcaagattgcccgcgagggcggccagatgacacccgccgacctggccaaattcgagccgcaacggcgctacgccactctcgtggcgctggccaccgagggcatggccaccgtcaccgacgaaatcatcgacctgcacgaccgcatcctgggtaagctgtttaacgctgccaagaataagcatcagcagcagttccaggcgtcaggcaaggccatcaacgccaaggtacgtctgtacgggcgcatcggtcaggcgctgatcgacgccaagcaatcaggccgcgatgcgtttgccgccatcgaggccgtcatgtcctgggattcctttgccgagagcgtcaccgaggcgcagaagctcgcgcaacccgatgacttcgatttcctgcatcgcatcggcgagagctacgccaccctgcgccgctatgcaccggaattccttgccgtgctcaagctgcgggccgcgcccgccgccaaaaacgtgcttgatgccattgaggtgctgcgcggcatgaacaccgacaacgcccgcaagctgccagccgatgcaccgaccggcttcatcaagccgcgctggcagaaactggtgatgaccgacgccggcatcgaccggcgctactacgaactgtgcgcgctgtccgagttgaagaactccctgcgctcgggcgacatctgggtgcagggttcacgccagttcaaggacttcgaggactacctggtaccgcccgagaagttcaccagcctcaagcagtccagcgaattgccgctggccgtggccaccgactgcgaacaatatctgcatgagcggctgacgctgctggaagcacaacttgccaccgtcaaccgcatggcggcagccaacgacctgccggatgccatcatcaccgagtcgggcttgaagatcacgccgctggatgcggcggtgcccgacaccgcgcaggcgctgatagaccagacagccatggtcctgccgcacgtcaagatcaccgaactgctgctcgaagtcgatgagtggacgggcttcacccggcacttcacgcacttgaaatcgggcgatctggccaaggacaagaacctgttgttgaccacgatcctggccgacgcgatcaacctgggcctgaccaagatggccgagtcctgccccggcacgacctacgcgaagctcgcttggctgcaagcctggcatacccgcgacgaaacgtactcgacagcgttggctgaactggtcaacgctcagtttcggcatccctttgccgggcactggggcgatggcaccacatcatcatcggacggacagaatttccgaaccgctagcaaggcaaagagcacggggcacatcaacccaaaatatggcagcagcccaggacggactttctacacccacatctccgaccaatacgcgccattccacaccaaggtggtcaatgtcggcctgcgcgactcaacctacgtgctcgacggcctgctgtaccacgaatccgacctgcggatcgaggagcactacaccgacacggcgggcttcaccgatcacgtcttcgccctgatgcacctcttgggcttccgcttcgcgccgcgcatccgcgacctgggcgacaccaagctctacatcccgaagggcgatgccgcctatgacgcgctcaagccgatgatcggcggcacgctcaacatcaagcacgtccgcgcccattgggacgaaatcctgcggctggccacctcgatcaagcagggcacggtgacggcctcgctgatgctcaggaaactcggcagctacccgcgccagaacggcttggccgtcgcgctgcgcgagttgggccgcatcgagcgcacgctgttcatcctcgactggctgcaaagcgtcgagctacgccgccgcgtgcatgccgggctgaacaagggcgaggcgcgcaatgcgctggcccgtgccgtgttcttcaaccgccttggtgaaatccgtgaccgcagtttcgagcagcagcgctaccgggccagcggcctcaacctggtgacggcggccatcgtgctgtggaacacggtctacctggagcgtgcggcgcatgcgttgcgcggcaatggtcatgccgtcgatgactcgctattgcagtacctgtcgccactcggctgggagcacatcaacctgaccggtgattacctatggcgcagcagcgccaagatcggcgcggggaagttcaggccgctacggcctctgcaaccggcttag

SEQ ID NO: 54 - DNA, 660 bp, artificial
  Centroid sequence
atggagaaaaaaatcactggatataccaccgttgatatatcccaatggcatcgtaaagaacattttgaggcatttcagtcagttgctcaatgtacctataaccagaccgttcagctggatattacggcctttttaaagaccgtaaagaaaaataagcacaagttttatccggcctttattcacattcttgcccgcctgatgaatgctcatccggaattccgtatggcaatgaaagacggtgagctggtgatatgggatagtgttcacccttgttacaccgttttccatgagcaaactgaaacgttttcatcgctctggagtgaataccacgacgatttccggcagtttctacacatatattcgcaagatgtggcgtgttacggtgaaaacctggcctatttccctaaagggtttattgagaatatgtttttcgtctcagccaatccctgggtgagtttcaccagttttgatttaaacgtggccaatatggacaacttcttcgcccccgttttcaccatgggcaaatattatacgcaaggcgacaaggtgctgatgccgctggcgattcaggttcatcatgccgtttgtgatggcttccatgtcggcagaatgcttaatgaattacaacagtactgcgatgagtggcagggcggggcgtaa

SEQ ID NO: 55 - DNA, 1005 bp, artificial
  Centroid sequence
atgcagaacatcacacttattggtatcgatctcggaaagcactccttccacattcattgtcaagacaagtctggtaaggctcttctgcgtaaaaaatttacccgtactaaactgatgcagtttctggcgacatgtccgccctcagttgttgtaatggaagcctgtgcgggtgcacactttatggctcgctgtatctctgattttgggcatgaaactaagctgatttctccacagttcgttcgcccgtttgtcaaaagtaataagaatgattttgttgatgcagaagccatatgcgaagcggcttcacgaccatcaatgcgttttgtccagccaagaactgagacccagcaggccatgagggcgttacaccgggtcagagaatcgctcatcagagataaggtgaaaacaaccaaccagatccacggtttcttgctggaatttggaatcagcctgccgataggtgatgctgtaataaaacggttgtctctcgtgttggctgaacacgaaatccccgaatatctgagccgccttttggtgaggttgcatacccactacttttaccttgttgagcaaatagcagagctggaatcagaattaagtcagtcaatcaacgctgatgataccgctcagcgcattatgacaattcctggtgttggtccgattactgccagcttactatcgtcgcaacttggtgacgggaaacagttctcatgcagcagggattttgcagcttccacaggacttgttccccggcagtatagcactggaggaaaatcgactctgttgggtatcagtaagcgaggtgataaaaatttacgccggttactggttcagtgtgcccgctcattcataatgcgacttgaacgcaagcatggaaaacttgctgagtgggttcgggagcaactcaacaagaagcattcgaatgtggttacctgcgctctggcaaataaactggctcgaattgcctgggcaatcactactcagaaaaaagaatatcaggcctga

SEQ ID NO: 56 - DNA, 327 bp, artificial
  Centroid sequence
atgtttgtctttccctccagcacgctctgcaaccacccgtataacggcaaattatgccgccatcatctgcatgactccgttgcgcgaaaggcattgaaggcagccgtacaaaaagcaggcatcgttagcaagcgtgtcacttgtcatacatttcgtcactcgtttgctacgcatctattacaagcggggcgtgatattcgcactgtgcaagaactcttagggcataacgatgttaagaccacgcaaatctatacgcatgtgttgggtcagcattttgccggcaccaccagtcctgcggatggactgatgctacttatcaatcagtaa

SEQ ID NO: 57 - DNA, 498 bp, artificial
  Centroid sequence
atgcgacaaaaaggttatgcgctgaaaactgaaaaaacttacctgcactggattaagcgttttattctgtttcacaaaaaacgtcatcctcagaccatgggcagtgaagaggtcaggctgtttttatccagcttagcaaacagcagacatgtagccataaacacgcagaaaatcgctttaaatgccctagcttttttgtacaacaggtttttacaacagccgttgggcgatattgattatatccctgcaagcaagcctagacggctaccctctgttatctctgcaaatgaagtgcaacgcattttgcaggttatggatactcgcaaccaagttatttttacgctgctgtatggtgcaggtttgcgcattaatgaatgcttgcgtttgcgggttaaagattttgattttgataatggctgcatcactgtgcatgacggtaagggtgggaaaagcagaaacagcctactgcccacgcgcctaatcccagcaataaaataa

SEQ ID NO: 58 - DNA, 525 bp, artificial
  Centroid sequence
atgaagatttcggtgatccctgagcaggtggcggaaacattggatgctgagaaccatttcattgttcgtgaagtgttcgatgtgcacctatccgaccaaggctttgaactatctaccagaagtgtgagcccctaccggaaggattacatctcggatgatgactctgatgaagactctgcttgctatggcgcattcatcgaccaagagcttgtcgggaagattgaactcaactcaacatggaacgatctagcctctatcgaacacattgttgtgtcgcacacgcaccgaggcaaaggagtcgcgcacagtctcatcgaatttgcgaaaaagtgggcactaagcagacagctccttggcatacgattagagacacaaacgaacaatgtacctgcctgcaatttgtacgcaaaatgtggctttactctcggcggcattgacctgttcacgtataaaactagacctcaagtctcgaacgaaacagcgatgtactggtactggttctcgggagcacaggatgacgcctaa

SEQ ID NO: 59 - DNA, 1617 bp, artificial
  Centroid sequence
gtggttaggctagctacatttaatgacaatgtgcaggttgtacatattggtcatttattccgtaactcgggtcataaggagtggcgtatttttgtttggtttaatccaatgcaagaacggaaatggactcgatttactcatttgcctttattaagtcgagctaaggtggttaacagtacaacaaagcaaataaataaggcggatcgtgtgattgagtttgaagcatcggatcttcaacgagccaaaataatcgattttcctaatctctcgtcctttgcttccgtacgcaacaaggatggagcgcagagttcatttatttacgaagctgaaacaccatatagcaagactcgttatcacatcccacagttagagctagctcggtcattatttttaattaactcctatttctgtcgaagctgtttgagcagtaccgctttacagcaagagttcgacgttcagtatgaggttgagcgagatcatttagagataaggatcttacccagttcatcgtttcctaaaggggcgttagagctgtcggccgtagtgcagcttttggtttggttgttttcggatcaagatgttatggattcgtatgaaagtatttttaggcactatcaacaaaatagagaaattaagaacggcgttgaaagctggtgctttagctttgaccctccgcccatgcagggttggaaattacatgtaaaaggacgttcttctaacgaggataaggattatttagttgaggaaatagtaggtttagaaatcaacgctatgcttcctagcacaacagctattagccatgcctcttttcaggaaaaggaggcaggtgatggtagtacgcagcacatagcggtttcaacagagtcagttgttgatgatgagcatctacagttggacgatgaggaaacagccaatatagacacagacacacgagtcatagaggctgagccgacatggataagttttagtagacctagtcgaattgaaaaatctcgcagggcaagaaaaagtagccaaactattttagaaaaagaagaagcaacaacaagtgaaaatagtaatttggttagtactgatgagccacacttaggtggtgtcctagcagcggcagatgtgggtgggaagcaggatgcaaccaattacaactctatttttgctaatcgatttgctgcttttgatgagctactttcaattctaaaaactaaatttgcatgtcgggtgctttttgaagaaaccttggttttgccaaaagttgggcgtagccgattacatctgtgtaaagatggctcaccaagagtgattaaagccgttggggtgcaacgtaatggcagtgaatttgtattgctagaggtggatgcatcggatggggtgaaaatgctttctaccaaagtgttgagtggcgttgatagcgaaacatggcggaatgattttgaaaagatacggcgtggagtggtgaagagctcattgaattggccaaatagtttgtttgatcaattatatggacaagacgggcatagaggggtgaatcatccaaaggggttgggggagctgcaagtatcgagagaggatatggaagggtgggctgagagagtggttagagagcaatttacgcattaa

SEQ ID NO: 60 - DNA, 822 bp, artificial
  Centroid sequence
atggctaaagcaaactcttcattttctgaagtgcaaattgcccgtcgtattaaagaggggcgtggccaagggcatggtaaagactatattccatggctaacagtacaagaagttccttcttcaggtcgttcccaccgtatttattctcataagacgggacgagtccatcatttgctatctgacttagagcttgctgtttttctcagtcttgagtgggagagcagcgtgctagatatacgcgagcagttccccttattacctagtgataccaggcagattgcaatagatagtggtattaagcatcctgttattcgtggtgtagatcaggttatgtctactgattttttagtggactgcaaagatggtccttttgagcagtttgctattcaagtcaaacctgcagcagccttacaagacgagcgtaccttagaaaaactagaactagagcgtcgctattggcagcaaaagcaaattccttggttcatttttactgataaagaaataaatcccgtagtaaaagaaaatattgaatggctttattcagtgaaaacagaagaagtttctgcggagcttttagcacaactatccccattggcccatatcctgcaagaaaaaggagatgaaaacattatcaatgtctgtaagcaggttgatattgcttatgatttggagttaggcaaaacattgagtgagatacgagccttaaccgcaaatggttttattaagttcaatatttataagtctttcagggcaaataagtgtgcagatctctgtattagccaagtagtgaatatggaggagttgcgctatgtggcaaattaa

SEQ ID NO: 61 - DNA, 594 bp, artificial
  Centroid sequence
atggaaaataaaaatcatcaacaagaaaattttaagagtacctatcaatcactggttaactcagcacgaatattgtttgttgaaaaaggctatcaagctgtttcaatagatgagatctcgggaaaagcgttggtgaccaaaggtgccttttatcatcactttaaaaataaaaaacaattactcagtgcctgttataagcagcaattaattatgattgatgcctacatcacaacaaaaactgatttaacaaatggttggtctgccttagaaagtatatttgaacattatcttgattatattattgataataataaaaaccttatccctatccaagaagtgatgcctatcattggttggaatgaacttgaaaaaattagccttgaatacattactggtaaggtaaacgccattgtcagcaaattgatccaagagaaccaacttaaagcttatgatgatgatgtgcttaaaaacttactcaatggctggtttatgcatatcgcaatacatgcgaaaaacctaaaagagcttgccgataaaaaaggccaatttattgctatttaccgcggctttttattgagcttgaaagataaataa

SEQ ID NO: 62 - DNA, 627 bp, artificial
  Centroid sequence
atgatgtctagattagataaaagtaaagtgattaacagcgcattagagctgcttaatgaggtcggaatcgaaggtttaacaacccgtaaactcgcccagaagctaggtgtagagcagcctacattgtattggcatgtaaaaaataagcgggctttgctcgacgccttagccattgagatgttagataggcaccatactcacttttgccctttagaaggggaaagctggcaagattttttacgtaataacgctaaaagttttagatgtgctttactaagtcatcgcgatggagcaaaagtacatttaggtacacggcctacagaaaaacagtatgaaactctcgaaaatcaattagcctttttatgccaacaaggtttttcactagagaatgcattatatgcactcagcgctgtggggcattttactttaggttgcgtattggaagatcaagagcatcaagtcgctaaagaagaaagggaaacacctactactgatagtatgccgccattattacgacaagctatcgaattatttgatcaccaaggtgcagagccagccttcttattcggccttgaattgatcatatgcggattagaaaaacaacttaaatgtgaaagtgggtcttaa

SEQ ID NO: 63 - DNA, 816 bp, artificial
  Centroid sequence
atgaataaatcgctcatcattttcggcatcgtcaacataacctcggacagtttctccgatggaggccggtatctggcgccagacgcagccattgcgcaggcgcgtaagctgatggccgagggggcagatgtgatcgacctcggtccggcatccagcaatcccgacgccgcgcctgtttcgtccgacacagaaatcgcgcgtatcgcgccggtgctggacgcgctcaaggcagatggcattcccgtctcgctcgacagttatcaacccgcgacgcaagcctatgccttgtcgcgtggtgtggcctatctcaatgatattcgcggttttccagacgctgcgttctatccgcaattggcgaaatcatctgccaaactcgtcgttatgcattcggtgcaagacgggcaggcagatcggcgcgaggcacccgctggcgacatcatggatcacattgcggcgttctttgacgcgcgcatcgcggcgctgacgggtgccggtatcaaacgcaaccgccttgtccttgatcccggcatggggttttttctgggggctgctcccgaaacctcgctctcggtgctggcgcggttcgatgaattgcggctgcgcttcgatttgccggtgcttctgtctgtttcgcgcaaatcctttctgcgcgcgctcacaggccgtggtccgggggatgtcggggccgcgacactcgctgcagagcttgccgccgccgcaggtggagctgacttcatccgcacacacgagccgcgccccttgcgcgacgggctggcggtattggcggcgctgaaagaaaccgcaagaattcgttaa

SEQ ID NO: 64 - DNA, 1206 bp, artificial
  Centroid sequence
atgaatagttcgacaaagatcgcattggtaattacgttactcgatgccatggggattggccttatcatgccagtcttgccaacgttattacgtgaatttattgcttcggaagatatcgctaaccactttggcgtattgcttgcactttatgcgttaatgcaggttatctttgctccttggcttggaaaaatgtctgaccgatttggtcggcgcccagtgctgttgttgtcattaataggcgcatcgctggattacttattgctggctttttcaagtgcgctttggatgctgtatttaggccgtttgctttcagggatcacaggagctactggggctgtcgcggcatcggtcattgccgataccacctcagcttctcaacgcgtgaagtggttcggttggttaggggcaagttttgggcttggtttaatagcggggcctattattggtggttttgcaggagagatttcaccgcatagtcccttttttatcgctgcgttgctaaatattgtcgctttccttgtggttatgttttggttccgtgaaaccaaaaatacacgtgataatacagataccgaagtaggggttgagacgcaatcgaattcggtatacatcactttatttaaaacgatgcccattttgttgattatttatttttcagcgcaattgataggccaaattcccgcaacggtgtgggtgctatttaccgaaaatcgttttggatggaatagcatgatggttggcttttcattagcgggtcttggtcttttacactcagtattccaagcctttgtggcaggaagaatagccactaaatggggcgaaaaaacggcagtactgctcggatttattgcagatagtagtgcatttgcctttttagcgtttatatctgaaggttggttagttttccctgttttaattttattggctggtggtgggatcgctttacctgcattacagggagtgatgtctatccaaacaaagagtcatcagcaaggtgctttacagggattattggtgagccttaccaatgcaaccggtgttattggcccattactgtttgctgttatttataatcattcactaccaatttgggatggctggatttggattattggtttagcgttttactgtattattatcctgctatcgatgaccttcatgttaacccctcaagctcaggggagtaaacaggagacaagtgcttag

SEQ ID NO: 65 - DNA, 789 bp, artificial
  Centroid sequence
atgagggaagcggtgatcgccgaagtatcgactcaactatcagaggtagttggcgtcatcgagcgccatctcgaaccgacgttgctggccgtacatttgtacggctccgcagtggatggcggcctgaagccacacagtgatattgatttgctggttacggtgaccgtaaggcttgatgaaacaacgcggcgagctttgatcaacgaccttttggaaacttcggcttcccctggagagagcgagattctccgcgctgtagaagtcaccattgttgtgcacgacgacatcattccgtggcgttatccagctaagcgcgaactgcaatttggagaatggcagcgcaatgacattcttgcaggtatcttcgagccagccacgatcgacattgatctggctatcttgctgacaaaagcaagagaacatagcgttgccttggtaggtccagcggcggaggaactctttgatccggttcctgaacaggatctatttgaggcgctaaatgaaaccttaacgctatggaactcgccgcccgactgggctggcgatgagcgaaatgtagtgcttacgttgtcccgcatttggtacagcgcagtaaccggcaaaatcgcgccgaaggatgtcgctgccgactgggcaatggagcgcctgccggcccagtatcagcccgtcatacttgaagctaggcaggcttatcttggacaagaagatcgcttggcctcgcgcgcagatcagttggaagaatttgttcactacgtgaaaggcgagatcaccaaggtagtcggcaaataa

SEQ ID NO: 66 - DNA, 1668 bp, artificial
  Centroid sequence
atgagtgctacccggattcaagcagtttatcgtgatacgggggtagaggcttatcgtgataatccttttatcgaggccttaccaccattacaagagtcagtgaatagtgctgcatcactgaaatcctctttacagcttacttcctctgacttgcaaaagtcccgtgttatcagagctcataccatttgtcgtattccagatgactattttcagccattaggtacgcatttgctactaagtgagcgtatttcggtcatgattcgaggtggctacgtaggcagaaatcctaaaacaggagatttacaaaagcatttacaaaatggttatgagcgtgttcaaacgggagagttggagacatttcgctttgaggaggcacgatctacggcacaaagcttattgttaattggttgttctggtagtgggaagacgacctctcttcatcgtattctagccacgtatcctcaggtgatttaccatcgtgaactcaatgtagagcaggtggtgtatttgaaaatagactgctcgcataatggttcgctaaaagaaatctgcttgaattttttcagagcgttggatcgagccttgggctcgaactatgagcgtcgttatggcttaaaacgtcatggtatagaaaccatgttggctttgatgtcgcaaatagccaatgcacatgctttagggttgttggttattgatgaaattcagcatttaagccgctctcgttcgggtggatctcaagagatgctgaacttttttgtgacgatggtgaatattattggcgtaccagtgatgttgattggtacccctaaagcacgagagatttttgaggctgatttgcggtctgcacgtagaggggcagggtttggagctatattctgggatcctatacaacaaacgcaacgtggaaagcccaatcaagagtggatcgcttttacggataatctttggcaattacagcttttacaacgcaaagatgcgctgttatcggatgaggtccgtgatgtgtggtatgagctaagccaaggagtgatggacattgtagtaaaactttttgtactcgctcagctccgtgcgctagctttaggcaatgagcgtattaccgctggtttattgcggcaagtgtatcaagatgagttaaagcctgtgcaccccatgctagaggcattacgctcgggtatcccagaacgcattgctcgttattctgatctagtcgttcccgagattgataaacggttaatccaacttcagctagatatcgcagcgatacaagaacaaacaccagaagaaaaagcccttcaagagttagataccgaagatcagcgtcatttatatctgatgctgaaagaggattacgattcaagcctgttaattcccactattaaaaaagcgtttagccagaatccaacgatgacaagacaaaagttactgcctcttgttttgcagtggttgatggaaggcgaaacggtagtgtcagaactagaaaagccctccaagagtaaaaaggtttcggctataaaggtagtcaagcccagcgactgggatagcttgcctgatacggatttacgttatatctattcacaacgccaacctgaaaaaaccatgcatgaacggttaaaagggaaaggggtaatagtggatatggcgagcttatttaaacaagcaggttag

SEQ ID NO: 67 - DNA, 1032 bp, artificial
  Centroid sequence
gtggcaggtctgaagaatacttcatataacgcagtacactggagtcagttagcacccgaagagcagatccgtttctgggaagactatgaagcgggaagggcgaccactttcctggttgaaccggaaaggaagcgcacgaagcgccgtcgcggtgagcactccaccaaacccaaatgcgaaaatccgtcctggtatcgtccggagcgctataaggcgctgagcgggcagctcgggcacgcctacaaccgtctggtgaaaaaggacccggtgaccggcgagcagagcctgcgcatgcacatgtctctgcatcctttttacgtgcagaaacgaacgtatgctggtcgcaaatatgctttccgtccggaaaaacaacgcctcctcgataccatctggccggttctggtcagcttcagtgatgcggtcacacataccgtaggcatgagtgtttcccgtctggccagagaaatcagcccgaaagacagcaaggggaaggttattccggaactggaagtgacggtctcccgcctttcccgtttgctggctgaacaggtacgttttggtgtgctgggggtttcagaggaaaccctgtgggaccgtgaaacccgccagcgtctgccacgttacgtctggataacaccggcaggctggcagatgctgggcgtcgacatggtgaaacttcacgaacagcagcagaagcggttgcgtgaaagtgaaatccgccagcaactcatccgggaaggcgtactgcgtgaggatgaagatatctccgtacatgcggccagaaaacgctggtatctgcagcgcagccaggatgcactgaaacaccgtcgtgcaaaagcggcagccagtaagcgcgccagacgtctgaagaaactgcctgccgaccagcagattcatgagatggcagagtatctcaggaagcgtctgccgccggatgaagcctatttttgttccgatgaccatctgaagcgactggccatcagggagttgcgtcagcttgaactgacgctggctgcgccaccgccgcactag

SEQ ID NO: 68 - DNA, 1209 bp, artificial
  Centroid sequence
atgtgcgaactcgatattttacacgactctctttaccaattctgccccgaattacacttaaaacgactcaacagcttaacgttggcttgccacgccttacttgactgtaaaactctcactcttaccgaacttggccgtaacctgccaaccaaagcgagaacaaaacataacatcaaacgaatcgaccgattgttaggtaatcgtcacctccacaaagagcgactcgctgtataccgttggcatgctagctttatctgttcgggcaatacgatgcccattgtacttgttgactggtctgatatccgtgagcaaaaacggcttatggtattgcgagcttcagtcgcactacacggtcgttctgttactctttatgagaaagcgttcccgctttcagagcaatgttcaaagaaagctcatgaccaatttctagccgaccttgcgagcattctaccgagtaacaccacaccgctcattgtcagtgatgctggctttaaagtgccatggtataaatccgttgagaagctgggttggtactggttaagtcgagtaagaggaaaagtacaatatgcagacctaggagcggaaaactggaaacctatcagcaacttacatgatatgtcatctagtcactcaaagactttaggctataagaggctgactaaaagcaatccaatctcatgccaaattctattgtataaatctcgctctaaaggccgaaaaaatcagcgctcgacacggactcattgtcaccacccgtcacctaaaatctactcagcgtcggcaaaggagccatggattctagcaactaacttacctgttgaaattcgaacacccaaacaacttgttaatatctattcgaagcgaatgcagattgaagaaaccttccgagacttgaaaagtcctgcctacggactaggcctacgccatagccgaacgagcagctcagagcgttttgatatcatgctgctaatcgccctgatgcttcaactaacatgttggcttgcgggcgttcatgctcagaaacaaggttgggacaagcacttccaggctaacacagtcagaaatcgaaacgtactctcaacagttcgcttaggcatggaagttttgcggcattctggctacacaataacaagggaagactcactcgtggctgcaaccctgcttactcaaaatctattcacacatggttacgttttggggaaattatga

SEQ ID NO: 69 - DNA, 477 bp, artificial
  Centroid sequence
atgtacataaggagtgctttcattatgccaatgatacttgtaaagaagaatccccggggcaaagtgattcgggagcttagcagtgaggaagagacagcagtaaagacggtctgtggactgaaaaagccagcaaccatggcactacataacctggccaatgatattctccgggaaatgcgtgagtatgatgcatggttacagtgtgactgtattccgggagattcgccggccatgaattttgctgctcttaaaaacaatacgggtactctttatctgtccagttttaatcatgagcatgcacctgaatgccccatgtatcgtcagttatccggaaatgaagaggaaacatcttccggagcaagccggcatcccgttagcacccgtataaattacagaaactttttaccacctgatgacagtaattggggtctgacgctcagtggaacgaaaactcacgttaagggattttggtcatga

SEQ ID NO: 70 - DNA, 534 bp, artificial
  Centroid sequence
gtgattattgtcgacgcagatgaccagaaatcagtattaacctggtacaacaatcgccctgaagatctccctcatattccggttacaggcgcgacaggtaacatcaaagccatgttaaaggaacacgaaaaatcctatgattttgttattgcagactgtgctggccgtgatagcgcagaaatgcgtagtggattgatggccgcagatgtattcatttctcctttgcgcccatctcagatggacctggatgttgtgcctcatacatgctccgtttttacagcagcaaaagattttaatgaggatgttcggggatatctcgttttaaacatgacgcccacaaatatgtttgttaatgaagccaatgaggcagctgaagtacttaaggattaccctgaaatgcatctggcaaactcccgggtatgtgatcgtaaagcacatcgagatgcttgggccgaatcaatgacaatttttgaaacgcaaaatgataaagcccagcaagaaatcgaagcgttagtgaaagaggttattctgtga

SEQ ID NO: 71 - DNA, 465 bp, artificial
  Centroid sequence
atggtgtctccacaaaaaacagaaaagggaaacagattctctttcattcagggcccgggagggctggagataacaatgaagtcttgttttgatactgacaaagcttttcatatgtcttttgatgaagtcactttcaacgctgacagaattcgctcaaaactggaactattatccgaagaactaatgccccgttgtggtcttgtttatgagctatatcagcgacgtttgagtgctgctattgataattttgtggccacattgccgacagaacaacatctactggtcctggaactggcccgtgaggagtttgattacctttccgcagaagagattgctgaagaaatacgccgtgactcagaacgcggctattgttgtcatggctttgaacgcaattgctgtcctctcggttgtggggatttgggcgatgattgctgcgatgctgctgatttgatggaggaaccgtga

SEQ ID NO: 72 - DNA, 846 bp, artificial
  Centroid sequence
ttggggttgatgttcatgccgcctgtttttcctgctcattggcacgtttcgcaacctgttctcattgcggacaccttttccagcctcgtttggaaagtttcattgccagacgggactcctgcaatcgtcaagggattgaaacctatagaagacattgctgatgaactgcgcggggccgactatctggtatggcgcaatgggaggggagcagtccggttgctcggtcgtgagaacaatctgatgttgctcgaatatgccggggagcgaatgctctctcacatcgttgccgagcacggcgactaccaggcgaccgaaattgcagcggaactaatggcgaagctgtatgccgcatctgaggaacccctgccttctgcccttctcccgatccgggatcgctttgcagctttgtttcagcgggcgcgcgatgatcaaaacgcaggttgtcaaactgactacgtccacgcggcgattatagccgatcaaatgatgagcaatgcctcggaactgcgtgggctacatggcgatctgcatcatgaaaacatcatgttctccagtcgcggctggctggtgatagatcccgtcggtctggtcggtgaagtgggctttggcgccgccaatatgttctacgatccggctgacagagacgacctttgtctcgatcctagacgcattgcacagatggcggacgcattctctcgtgcgctggacgtcgatccgcgtcgcctgctcgaccaggcgtacgcttatgggtgcctttccgcagcttggaacgcggatggagaagaggagcaacgcgatctagctatcgcggccgcgatcaagcaggtgcgacagacgtcatactag

SEQ ID NO: 73 - DNA, 1158 bp, artificial
  Centroid sequence
gtggctgtttatgaatcatgccaggttaccgatctgcaaattacaaatgctggcgtcatgctcgctacaaatcaggatttacccagcgagacgtttgatttagcggtgattgccacgggtcacgtctggcctgatgaagaagaagcaatccgaacgtattttcccagcccgtggtcaggcctgatggaagcaaaggtcgatgcgtgtaacgtgggtattatgggaacatccttgagcggactggatgcggcaatggcagtggcaattcagcatggttcgttcattgaagatgataaacaacacgtcgtttttcaccgcgataacgcaagtgaaaagctaaatattacgttaatgtcgcgcacgggtattttacccgaagccgatttctattgccctattccctacgagcccttacacatcgtcactgatcaggcattaaatgctgagattcaaaaagtcgaatatggccttttggatcaggtatttagattgatagtagaggaaatcaagtttgctgatccagactggagccaacgcatagccttagagagcctgaatgtcgattcctttgctcaagcctggtttgccgagcgcaaacaacgcgacccatttgactgggcagaaaaaaatctccaggaagtcgaacgcaataaacgagaaaaacatactgttccctggcgttatgtcattctgcgcctgcatgaagcagtacaggaaattgttccacatctgaatgaacacgaccataaacggttcagtaaaggccttgcccgggttttcatcgataattatgccgcaatcccttcagagtctattcgtcggctgctggccttacgtgaagcgggaatcattcatattctcgctctcggtgaagactacaaaatggaaattaacgagtcgcgcaccgtcctgaaaacggaagacaacagctactcgtttgacgtttttattgatgcccgcgggcagcgtccgcttaaagtgaaagatcttcctttccctggactacgcgaacaattacagaaaacaggggatgaaatccctgatgttggtgaagattatacgttacagcaacccgaagatattcgtgggcgcgttgccctggttaatgcacgaccagcctttcgttcagggacttacggcatgtgcagaaattggtga

SEQ ID NO: 74 - DNA, 117 bp, artificial
  Centroid sequence
atgggaaaaaatcaggaagaaaggaaaactcccgtcattgtggtgaaaaaacgtcgtactttttcgctaccgtccttatccgaaaaaacagatattatcgcacctgtatttacttga

SEQ ID NO: 75 - DNA, 699 bp, artificial
  Centroid sequence
atgcaggatattcacgaagaaagtctgagcgagtcggttaaatcagagcagtcaccgcgggtggtactctgggaaatcgacctgacggtacagggtggtgagcggtattttttctgcaatgagctgaatgaaaaaggggagccggtgacctggcaggggcgtgaatatcaggcgtacccgattgagggcagcggctttgagatgaacggaaagggcagcagtgcccgcccgtcgctgacggtgtccaatctgtttggccttgtcaccgggatggcggaggatttgcagagtctggtgggtgccacggtggtccgtcgccgggtgtatgcgcgttttctggatgcggtgaactttgtggcaggcaatcctgaggcagacccggagcaggagctgacggaccggtgggtggtggagcagatgtcagcgctgacgtccatgacggcctcgtttgtgctggcgacaccgacggagacggacggtgcgctgtttcccggtcgcatcatgctggcgaacacctgtatgtggacctaccgctctgatgagtgtggttacacgggcggggctgtggcggatgagttcgataaacccaccacggatatccgtaaggacagatgcagcaagtgcatgcgcgggtgtgaactgcgcaggaatgtcggcaattttggcggtttcctttccatcaataaactttcgcagtaa

SEQ ID NO: 76 - DNA, 177 bp, artificial
  Centroid sequence
atggacagtgaggcgcgtgagtaccgttctttcagggaggctattgccactgaaagcactgaagaggtgcgcttccattatgtgttcatcgacggctactggaaggtgatgtaccgcacgccggaaggctggaagatgaaagcgctcgcgctggcactgcgtcgctgtccgaaatga

SEQ ID NO: 77 - DNA, 741 bp, artificial
  Centroid sequence
atgaaaaacattacgtcaggtggtgttctggcaagaatcagcagatttgtgccgcaggatgcaatccctccgtaccgtacggtggcggagtggcgggaatggcagcttgctgaagggcgtaagcgaagcgaggaggttaatcgtctgaatcatcagacgcgggttgaaaaaatcattaaccgctccggtatccagccgcttcaccggaagtgtacgttctgtaactaccgggtgcagaacgctggtcagcgccatgccctgagtcaggcgaaatccattgcggcagagctggaaggcggctgtacgaattttgtgttcagtggccggcctggcacaggaaaaaaccacctggcggcggcgataggcaatcggctgatggagaaggggcgcagcgtaattatcatcactgtgtctgatgtcatgagtgtgttgcacgacagttacgacaacggcaaatcaggtgaaaaatttttacaggagctttgcggggtggatttgctggtcctggatgaaattggcatgcagcgggatacgcgtaatgagcaggtcacgcttaatcagattgttgaccgcagaacggcatcgttactcagtgtggggatgctgacaaatcttaatcatgcagcgatgaatacacttctcggcgagcgggtgatggaccgcatgtccatgaacggaggtcgctgggtgacgtttaactgggagagctggcgtccgaacgtcagccagcacaggaactga

SEQ ID NO: 78 - DNA, 342 bp, artificial
  Centroid sequence
gtggaaaaaataaaggccctgtttcctcatcttcgtgctgaaggtggtggatttattcccctgaaaattggcataaacaatgatatttcggcatttctggcagaacacccggagacagaactgaccatggacgaatggctctgtgcagtgtcctgcatcacatcccgccgcgtatatctgcagcggacagctgtcgccggcgtcccacgttatggcctggatggtcaccccaaagggcaggtctcagactctgaagcacagagtgccggtcgcagactggcgacattagaacaaaagtggctcaggatgcaggcacagcaggagaatatttctgggcaataa

SEQ ID NO: 79 - DNA, 732 bp, artificial
  Centroid sequence
gtggcttattacagcattggtgatgttgctgaacgttgcgggattaatcctgtcactctccgggcctggcaacgccgctacggtttgttaaaaccacagcgcagtgaaggcggacaccgactctttgatgaagaagacatacaacgcatcgaagagatcaagcgttggataagtaatggcgtccctgtaggcaaagttaaagcattactggaaaccaccagccaggatacggaagatgactggagccgcctgcaagaagagatgatgtcaattcttcgcatggctaatcctgccaaactacgcgcgagaattatttcactgggtcgagagtacccagtagatcaattgattaatcatgtttaccttcctgttcgccagcgtctcgtgcttgatcacaacacctcccgcattatgagcagtatgtttgacggcgcattaattgaatacgcagcaacctcgcttttcgaaatgcgccgtaagcccggtaaagaagccattctgatggcgtggaatgttgaagagagagcacgattgtggctggaagcatggcgtttatcattgtcaggatggcacatttctgttcttgctgatcccattgaatcgccgcgcccggaactgttcccgacgcaaacattgattgtctggacaggcatggcaccaacgagaaggcaaaacgaacttttacaacactggggtgagcaaggttataaagtcatctttcatgccccctaa

SEQ ID NO: 80 - DNA, 390 bp, artificial
  Centroid sequence
atgaagctgattctgccgtttccgcccagcgtgaacacgtactggcgacaccccaacaaaggggcgtttgctggtaagagcctgataagcgcggcggggcgcaaattccagagcgcggcgtgtgcagcaatagttgagcagttacgtcgtctgccaaaaccaacgtcggcacctgcttcagtggagatcgtgttgtttcctccggataaccggatccgcgatctggacaactataacaaggcgctgtttgacgccctgacccacgcgggtgtgtgggaagacgacagtcaggtgaaaagaatgctggtggagtggggaccggttatcccggaagggaaggtcgagatcactatcagtaagtacgagaaaacggcgggtgcagctgcctga

SEQ ID NO: 81 - DNA, 249 bp, artificial
  Centroid sequence
atgatccgcattgaaattcttttcgaccgccagagcacaaaaaacctcaaatcaggcacacttcaggcgctacagaatgaaatcgaacaacgtctgaaaccacactacccggaaatctggctgcgtatagaccagggcagcgccccgtctgtatctgtcacaggagcccgcaacgacaaggataaagaacgtatcctgtctctgctggaagaaatctggcaggacgacagctggctgcctgcagcatga

SEQ ID NO: 82 - DNA, 804 bp, artificial
  Centroid sequence
ttgaatcgaactaatattttttttggtgaatcgcattctgactggttgcctgtcagaggcggagaatctggtgattttgtttttcgacgtggtgacgggcatgccttcgcgaaaatcgcacctgcttcccgccgcggtgagctcgctggagagcgtgaccgcctcatttggctcaaaggtcgaggtgtggcttgccccgaggtcatcaactggcaggaggaacaggagggtgcatgcttggtgataacggcaattccgggagtaccggcggctgatctgtctggagcggatttgctcaaagcgtggccgtcaatggggcagcaacttggcgctgttcacagcctatcggttgatcaatgtccgtttgagcgcaggctgtcgcgaatgttcggacgcgccgttgatgtggtgtcccgcaatgccgtcaatcccgacttcttaccggacgaggacaagagtacgccgcagctcgatcttttggctcgtgtcgaacgagagctaccggtgcggctcgaccaagagcgcaccgatatggttgtttgccatggtgatccctgcatgccgaacttcatggtggaccctaaaactcttcaatgcacgggtctgatcgaccttgggcggctcggaacagcagatcgctatgccgatttggcactcatgattgctaacgccgaagagaactgggcagcgccagatgaagcagagcgcgccttcgctgtcctattcaatgtattggggatcgaagcccccgaccgcgaacgccttgccttctatctgcgattggaccctctgacttggggttga

SEQ ID NO: 83 - DNA, 267 bp, artificial
  Centroid sequence
atgagaccatcaattatcttcgcaaccgccgagtatgtaaagcgtctgcgagaagagtgcctgcgggagaacaaacccctgcaccgccatacccgcttcagacgccaggaactggcaccggatgagattaacccggacgtcctggcgatgggcggtcatatcgccagacgctgcagtgagcagaagcgggtacgtatccccgccatgaaagtcagcgaatggggccacctgctccgcgcgcttgaaattgaacgggtctgtcactga

SEQ ID NO: 84 - DNA, 954 bp, artificial
  Centroid sequence
atgaatcctttgttaaccgattcccgccgtcaggcgctgcgttcagcttcccactggtatgccgtgctaagcggcgagcgcgtcagcccacaacaggaagcgcgctggcaacagtggtatgaacaggatcaggataaccagtgggcctggcagcaggttgaaaacctgcgcaaccagcttggcggtgtgcctggcgacgttgccagccgggcgttgcacgatacccgcctcacccgccgtcacgtgatgaaaggattactgctgttgctcggcgctggcggaggctggcagctctggcagtcggaaaccggcgaaggtctgcgggcagattaccgcaccgccaaaggcacagtcagccgtcagcaactggaagatggctccctgctcacgctgaatacccaaagcgcggcggatgtgcgttttgatgcgcatcagcgcaccgtccggctctggtacggtgaaatcgccattactaccgcgaaagatgccctgcaacgccccttccgtgtcctgacccgtcagggccagctcactgctttagggacagaatttaccgtccgccagcaggataatttcacgcagcttgacgtgcagcagcacgctgtggaagtgcttctcgccagtgcccccgcgcaaaaacgcatcgtgaacgctggtgaaagcctgcagttcagcgcctctgagtttggcgcagtgaaaccgctggatgacgagagtacaagctggacgaaggacatcctgagcttcagcgataaaccgctgggtgaggtgatagccacgctaacccgttaccgcaacggcgtgctgcgctgcgatcccgccgttgccgggctgcgcctgagcgggacgttcccgctgaaaaataccgatgcgatcctgaacgttatcgcgcaaacgcttcccgttaaaattcagtctattacgcggtactggataaacatttcaccactgtaa

SEQ ID NO: 85 - DNA, 438 bp, artificial
  Centroid sequence
atgagtaccgtttatcaccgtccggctgacccttcaggcgatgacagttacgtgcgaccgttgtttgccgatcgttgccaggccggttttccttcgcctgccactgattatgctgagcaggaactggatctgaacagctattgcatcagcagacctgcagccaccttctttctgcgcgccagcggtgaatcgatgaaccaggctggcgtgcagaatggtgatctgctggtagtggacagggccgaaaaaccacaacacggggacatcgttatcgctgagatcgacggtgagttcaccgtcaaacgactgctgttgcgcccacgcccggcactggagccggtttcagacagcccggagttccgcacactgtatccggaaaacatctgtatttttggtgttgtcactcacgtgatacacaggacgcgggagttacgctga

SEQ ID NO: 86 - DNA, 864 bp, artificial
  Centroid sequence
atgggaagtggatggcatgaatggccgctgatgatcttcacggtcttcgggcaatgtgtggcgggtggttttatcgttctggctttggcgctgcttaaaggcgacctgcgagcagaagcccagcagcgtgttatcgcctgcatgtttggcttatgggtgctgatgggcattggctttatcgcctctatgctccatcttggttcaccgatgcgcgcctttaactcgctcaaccgggtaggggcttcagcactcagtaacgaaatcgccagcggttcgatcttttttgctgtaggcggcatcggctggttgctggcaatgctgaaaaagctgtcacctgcattgcgtacgctatggctggtggtgacgatggttcttggcgtcgtctttgtctggatgatggtgcgtgtgtataacagcattgataccgttccgacctggtacagcatctggacgccgatgggcttcttcctgacgatgttcatgggcggcccgttactgggttacctgttgctgagtctggctggcgtcgatggctgggcgatgcgtctgctgccagccatttctgtactggcactggtggtgagtggcgtgatgtcagtgatgcagggcacagagctggcaactattcatagttctgtgcagcaggccgcagcgctggtgccggactatggtgcgctgatgtcctggcgaatcgtgcttttggccgttgccctgtgcttgtggattgcaccacagctaaaaggttatcagcctgcggttccgctactatccgtctcattcattctgcttctggcaggggaattaatcggtcgcggcgtattctatggtttgcatatgaccgtggggatggccgtcgcaagctaa

SEQ ID NO: 87 - DNA, 768 bp, artificial
  Centroid sequence
atgactttacgaactgaaaatctgacggtcagttacgggacagacaaggtacttaacgacgtttcactctcactgccaacggggaagatcaccgccctgatcggtcctaacggttgcgggaaatcgacgctgttaaactgtttttcgcggcttttaatgccgcagtctggcaccgtatttctcggcgataatcccataaatatgctctcatcgcgccagttggcccgcaggctttcgctgctgcctcagcaccatttaacgccagaggggatcacagtccaggagctggtttcgtatggtcgtaatccctggctgtcactctgggggcgtctctccgctgaagacaatgcacgagttaatgtcgccatgaaccagacccggatcaatcatcttgccgttcgtcggttaaccgagctttccggcggtcagcgccagcgcgcatttctggcaatggtcctggcccagaatacgcccgttgtattacttgatgagccaaccacctatcttgatatcaatcaccaggtggacctgatgcggttgatgggcgaactccggactcaggggaaaacggtggtcgctgtgctgcacgaccttaatcaggctagccggtactgcgatcaactggtggtaatggcaaacggacatgttatggcgcaaggcacaccagaagaggtgatgaccccaggattgctgagaacagtattcagcgtggaagcggaaatacaccccgagccggtatctggcaggccgatgtgcctaatgaggtag

SEQ ID NO: 88 - DNA, 903 bp, artificial
  Centroid sequence
atgttggcatttatccgttttctttttgcaggcctgctgctggtgatcggccacgcctttgccgccacggttcaggacgaacacggcacgtttacactcgataaaacgccacaacggattgtggtgctggaactctcgttcgccgatgcgctggccgccgtggacgtcagcccgatcggtattgccgacgataacgatgcaaaacgcatcctgcccgaagtgcgtgcgcacctgaaaccgtggcagtccgtcggaacgcgcgcgcagccgagcctggaagccattgctgccctgaaaccagacctgatcattgccgacagcagtcgccatgcggggatttacaccgccttgcagcaaatcgcgccggtactgctgcttaagtcccgcaacgaaacctacgctgaaaatttgcactcagcggctatcatcggcgaagtggtaggtaaaaaacgagagatgcaggcgcgtctggaacaacataaagagaagatggcgcagtgggccagccagcttcccacagggacacgcgtggcctttggcacatcacgcgaacagctattcaacctgcatacccaggagacctggaccggcagcgtgctggcttctctggggctgaacgttcccgctgcgatggcgggcgcgtccatgccgtccatcggcctggagcaactgctggcggtcaatcctgcctggctgctggttgcccactatcgcgaagagagcattgttaaacgctggcaacaagatccgctctggcagatattaaccgccgcgcagaagcagcaggttgcttcagtcgacagtaacgcctgggcgcggatgcgcggtatttttgccgcagagcgtattgccgctgacacggtaaaaatcttccaccatcagccgcttaccgatgtgaaatga

SEQ ID NO: 89 - DNA, 999 bp, artificial
  Centroid sequence
atgaccgcgctaaaacacccggtgctgctgtgggggcttcccgttgcagtacttattattattttctggctgagtctgttttgctactcggccattcctgtttccggagcagacgcaatccgcgccctgctgcctggacacacgccaacgctaccagaagcgctggtgcaaaaccttcgtttgccgcgaagcctggtcgccgttctgatcggcgcaagcctggcgctcgcgggcacgctgctgcaaaccctgacccacaacccaatggcctctccttcactgctcggcattaacagcggcgcggcgctggctatggcgcttaccagcgcgctgagtccgacgccggttgcaggctattccctgtcgttcatcgcggcatgcgggggcggcgtgagctggctgctggtcatgaccgcaggaggcgggtttcgtcatacccaggacagaaacaaactgatcctcgcgggtatcgcgctgtcggccttttgtatggccctgacccgcatcaccctactgctggccgaagatcatgcttacggcatcttttactggctggcaggcggagtgtcccacgcccactggcaggatgtctggcagctcttgccggtggtggtcactgcagtccctgtcgtgttgctgctggcgaatcaactgaacctgctcaacgtcagcgacagtaccgcccatacgctgggagtgaacctgccgagactacgtttgatcatcaatatgttagtgctgcttctggttggcgcgtgcgtcagtgtggcaggtccggtggcgtttatcggcctgctggtgccacatctggcgcgcttctgggcaggcttcgatcagcgcaacgtactgccggtgagcatgctgctgggggccacgctgatgctgatggcagatgtactcgcacgcgcgctggccttccccggcgatctgcccgcaggcgcagtgctggcgctgattggcagtccttgctttgtctggctggtgaggaggcgaggatga

SEQ ID NO: 90 - DNA, 522 bp, artificial
  Centroid sequence
atgtctgaccgcgccactaccacagcttccttaacgttcgagtcgctttatggcacacatcacggctggttgaaaagctggctgacgcgcaaactccagtctgcttttgatgcagatgacattgcccaggacacttttttgcgggtaatggtcagcgaaacgctctcgacgatccgcgatcctcgctccttcctctgcactatcgccaaacgcgtgatggtggacctgtttcgccgaaacgcgctggaaaaagcgtatctggagatgctggcgcttatgccggaggggggagcgccttcacctgaggaacgcgaaagccaactcgagaccctacaactcctcgacagcatgctggacgggctaaacggcaaaacacgtgaagcgtttctgctttcgcaactggatggtctgacatacagcgagattgcgcacaaactcggtgtttccatcagctccgtgaaaaaatacgtggcgaaagccgtcgagcactgcctgctgttccgtctggagtatgggttatga

SEQ ID NO: 91 - DNA, 2241 bp, artificial
  Centroid sequence
atgcttggtcaatatttctgccgtataagaaaaataattctcatttcaattgtcctttttccccttctcgttcgactaacagataaacacaacaaaaatgatgatggagaaggtatgacaactttacgtgtttttcgcaaaacaacacctttggtttacgcaattcgcctgagcctgctgccgctggccgggttatcgttatccgccttcgcaacgcaggttgatatcgcaccgggttcgctcgacaaagaagatgtcctgaccgtggtgggcgactggctaggggatgcgcgcgaaaacgacgtcttcgaacatgctggcgcgcgtgacgttatccgccgtgaggattccgccaaaaccggcgcgacgaccatgcgcgatgtgctgaatcgcatccctggtgtcactgccccggaaaacaacggcaccggcagccacgatctggcgatgaactttggtattcgcggcctgactccgcgccttgccagccgttcaaccgtactgatggacggtattcccgtaccgtttgccccttacggccagccacagctttcactggcgcctgtctcactcgggaatatggacgccatcgacgtggtacgcggcggtggtgcggtgcgttacgggccgcagagcgtgggcggtgtggtgaactttgtcacccgcaccattccgcaagacttcggcatcgaagccggcgtggaaggccagctcagcccgacgtcctcacaaaataacccaaaagagacgcacaatctgatggtgggcggcacggcggataacggttttggtaccgccctgctttactccggcactcgcggcagcgactggcgcgagcacagcgcaacgcgcatcgacgacctgatgctgaaaagcaaatatgcgccgaacgaggtgcataccttcaacagcctgctgcaatactacgacggtgaagccgacatgcccggcggcctgtctcgcgcggattacaacgccgaccgctggctgtccacgcgccattacgatcgtttctgggggcgtcgcaagctggcaagcctcggctatcagttccagccggacagccagcataaattcaatattcagggcttctacaccgaaaccctgcgcagcggctacctagaacagggcaaacacatcaccctttcaccgcgtaactactgggtacgcggcattgaaccgcgctacagccagagctttatggtcggcccgagcgcacacgaggtgggcgtcggttaccggtatgtgaatgaatccacgcacgaaatgcgttactacaccgccaccagcagcgggcagctaccgtccagctcaagtccgtacaatcgcgacacccgttccggtaccgaagcgcatgcctggtatctggatgacaaaatcgacattggcaactggtcgatcaccctaggtatgcgctttgaacatatcgagtcataccagaacaacgctatcaaaggcacgcataaggaagtgagctacaacgccccacttccggcgttaaacgttctctatcacctcactgacagctggaatctttatgcaaacaccgaaggctcgttcggcaccgtacagtacagccaaattggcaaggctgtgcaaagcggcaatgtggaaccggaaaaagcacgaacttgggagctcggaacccgatatgacgatggcgcgctgacggcagaaatggggctgttcctgattaactttaataatcagtaccactccaaccagaccaacgacaccgtgaccgcacggggtaaaacgcgccataccgggctggaaaccctggtccgctatgacctcggcacgctgacgcccacgctcgataacgtctccgtctatgcaagctatgcgtacgtaaatgccgagatccgcgagaaaggcgacacctatggcaaccaagtaccgttctcgccgaaacacaaaggcacgctgggcgtggattacaagctaggcagttggacgttcaacctgaacagcgatttccagtccagccagtttgcggataacgccaacactgttaaagagagcgccgatggcagtaccggccgcatccccggattcatgctctggggcgcgagcgtggcgtatgactttggtccgcagatggcagacctgaaccttgcgttcggcgtgaaaaatatcttcgaccaggattatttcatccgctcttacgacgacaacaacaaaggcatctacgcaggtcagccgcgcacgctgtatatgcagggggcgttgaagttctaa

SEQ ID NO: 92 - DNA, 957 bp, artificial
  Centroid sequence
atgaaaattgcgctggttattttcatcacccttgccctggcgggctgtgcgctgttatcactccatatgggagtgatccccgtgccgtggcgcgcgctgctgaccgactggcaggccggacgcgagcattattatgtattgatggagtaccgactgccgcgcttgctgctggcactgtttgtcggtgcagccctcgccgtggcgggcgtgctgatacaggggattgtgcgcaaccctctggcatcaccggatattctcggcgttaaccatgccgccagcctggcctctgtgggggctctacttcttatgccgtcactgcccgtgatggtgctgccgctgctggcctttgcgggcggcatggcggggttgatattgctgaagatgctggcaaagacccaccagccgatgaagctggcactcaccggcgtggcgctttctgcatgctgggccagcctgacggattatctgatgctctcgcgcccgcaggatgtgaacaacgccctgctgtggctgaccggcagcttatggggccgtgactggagctttgtgaagattgccatcccgctgatgattttatttctgccgctgagcctgagtttttgccgcgatctcgacctccttgcactcggcgatgcgcgcgccaccacgctcggtgtgtcggtgccctatacccgattctgggctttgttactagctgtcgccatgacatctaccggcgtggccgcctgcggcccgattagctttattggtctcgtggtgccgcatatgatgcgtagcatcaccggtggacgtcaccgcagactgctgcctgtttcggccctgacaggtgcgttgctgttggtggttgccgatctgctggcgagaattattcatcccccactggagctcccggttggcgtgctgaccgccattatcggtgcgccgtggtttgtctggttgcttgtgagaatgcgataa

SEQ ID NO: 93 - DNA, 819 bp, artificial
  Centroid sequence
gtgaaactgacaacacatcatctacgggcgggggccgcattattgctggcaggaattctgctggcaggttgcgaccagagcagcagcgatgcaaaacacattaaagttggcgttataaatggcgcagaacaagatgtcgcggaagtcgctaaaaaggtggcaaaagagaaatatggcctcgatgttgaactggtaggttttagcggttcgttgctaccgaacgatgcgacaaatcatggcgaacctgatgcgaacgtcttccagcatcgaccctttcttgaacaagataatcaggcgcatggttataaactggtagcggtgggaaatacgtttgtcttccctatggcgggttattccaaaaaaatcaaaaccgtggcgcaaataaaagaaggcgcgacagtggcgatccccaacgacccgaccaaccttggtcgcgcacttttactgttgcaaaaagagaagctaattactctgaaagagggaaaagggttattacctaccgcgctggatataaccgataatcctcgtcatttgcagattatggaactcgagggggcgcagctcccgcgcgtactggatgatcccaaagttgatgtagcgattatcagcaccacttacattcagcagacagggctttctccggtgcacgacagcgtatttattgaagataagaattcgccgtatgtgaatattttggtggcacgggaagataataagaatgcagaaaacgtgaaggaatttctgcaatcttatcaatcacccgaagtcgctaaagcggcagaaaccatttttaacggtggcgcggtgcctggctggtaa

SEQ ID NO: 94 - DNA, 1551 bp, artificial
  Centroid sequence
atgcgaacgtcattatttgcgctggcgtcactttctgaggccgctatggacgcattactgcaactcaaagggatcgataaagcgttccccggcgtgaaggctctctccggcgccgcgttaaacgtttatcctggccgcgttatggcgctggtgggggaaaacggcgccggaaaatccaccatgatgaaagtattaaccggcatctatacgcgagatgcgggatcgttgttatggctgggtaaagagaccacctttaatgggcctaaatcgtctcaggaagccgggatcggcattattcatcaggaactgaacctgattccgcagttgaccattgcggaaaacatcttcctgggccgtgagtttgtgaatcgctttggtaaaatcgactggaaaaagatgtatgccgaagccgaccacctcttagccaaactcaatctgcgctttaagagcgataagctggtgggcgaactctctatcggcgatcagcaaatggtggaaatcgccaaagtgctgagcttcgaatccaaagtcatcattatggatgaaccgaccgatgcgctgaccgacactgaaaccgactctctgttccgcgttatccgcgaattaaaatcgcaggggcgcggcattgtctatatctctcaccgtatgaaagagattttcgaaatttgcgatgacgtgacggtcttccgcgatgggcaatttatcgccgagcgtgaagtggccacgttgaccgaagattctcttatcgaaatgatggtgggacgtaagctggaagatcagtacccgcatctggataacgcgccgggtgagattcgcctgaaggtcgataatctgtgcggaccgggcgtgaacgatgtctcttttgtgctgcgaaaaggcgagattcttggcatctccggcctgatgggcaccggtcgcactgagctgatgaaagtattgtacggcgcgatgccgcgaaccagcggttacgtgacgctcgagggacacgaagtggtgacgcgttctccgcaggacgggctggccaatggcatcgtttatatctctgaagaccgtaagcgcgatggactggtgctcggcatgtcagttaaagagaatatgtcgctgactgcgctggattatttcagtcgcgctggcggaagcctgaaacacaaagatgagcagcaggcggtgggggattttatccgtctgttcaacgtcaagacgccgtcaatggaacaggcgataggcctgctttctggcggtaatcagcaaaaagtggcgattgcccgcgggttgatgacgcgcccgaaagtgctcattctcgacgagccgacccgcggcgtggacgtcggcgccaagaaagagatttaccagcttatcaaccagtttaaggccgacggcctgagcatcattctggtctcatctgagatgccagaagtattaggcatgagcgatcgcatcatcgtcatgcatgaagggcatctcagcggtgaatttactcgcgagcaggccacccaggaagtgttaatggctgccgcagtgggcaagcttaatcgcgtgaatcaggagtaa

SEQ ID NO: 95 - DNA, 705 bp, artificial
  Centroid sequence
atgcgtacacgattagccagcgaactatggccgttaatagcattattatgtctggcatcgctatgctgcaacttacttctactgactctggatgagtataattataccatctggtatatcagtcgcgggattgaagtctccagtaaactgtttgttgtgtcttttctgatttataacatttttcaggagctgcaactctccagcaaactggcagttcatgatgtgctgaccaatatttataatcggcgctactttttcaacagcgtagagtcattattgtcgcgacctgttgttaaggacttctgtgtcatgctggttgatattaatcagttcaaacgcatcaatgcccaatggggacatcgtgtgggtgataaagtgctggtttcaattgtcgatattatccagcaaagcatccgccccgatgatattttagcgcgactggagggtgaggtgtttggcttgctatttaccgaactcaatagtgcccaggcaaaaatcattgcggaacgtatgcgtaaaaatgtcgaactcctgaccggctttagtaacagatatgatgttcctgaacaaatgaccatcagtattggcacggttttttcaacgggtgacacgcgtaatatctcgcttgtcatgacggaagcagataaagccttacgcgaagcgaaaagcgaggggggcaacaaagtgattattcatcatatttaa

SEQ ID NO: 96 - DNA, 870 bp, artificial
  Centroid sequence
gtggaattttccgtattaagtaacaatctgaaaatgccgatgatgggatttggtgtttttcaggttaccgataaaaacgtgtgcaaacagtcagtgttgaacgctatccgcacaggttatcgactcatcgacactgcagcggtatacggtaatgaagatgccgtcggtgaagccgttcgtgaagctatatctgaaggtttatgtacccgagatgagttatttataacgtctaaattgtgggtgcaggatatgttgaatcaggatacggcagcagcaggtattgaagcatcattaaaaaaatcgggactagagtacttcgacctctatttattgcaccaggctatgcgcgattatttcagtgcgtggcgtgcactcgaagatgcctatgaagagggcaaattaaaagcaattggggtttccaatttctatcctcatgttctggcgaacttttgtgaaacggtaagagttaaaccgatggtcaaccaggtcgagttgcatccctattttgcccaaccagaggcgctggcaaccatgaagtattataacgtgcagcctgaagcatgggctccgttaggtggtggacgacataaaccctttgaaaataatctgcttcagagtattgcagatgcccatcaaaaatcgatttctcaagtcattctgcgttggaatattcaacggggagtggtcgttattccgaaatcgacacatcaacagcgtatcgaagaaaattttgctatctgggatttctcactgacagagaaagaaatggcacaaattagttcgcttgatttgggttatgttggggagtcggtaaaacattttaatcctgaatttgttcgtggttgtcttgctgtaaaaatacatgattga

SEQ ID NO: 97 - DNA, 747 bp, artificial
  Centroid sequence
atgagccaatatctaatttttcagcttcatgggccgatggcatcctggggcgtcgatgcccccggtgaagtgcgtcatacccatgaactgccttcgcgctcagcattgctggggctgctggctgccggggtagggattcggcgtgatgataccgaacgcttaaacgcgtttaatcgccactattcactggtggtttgcgccagccgtaacccgcgctgggcacgggattatcacacggtccagatgccaaaagaggtgcgtaaagcgcgttatttcagccgtcgcgaagagttgagtaatcttgaactgctaagcgcgattatctcccggcgcgactattacaccgacgcctggtggatggtggcggtggcaacaacccccgatgcgccttacagcctcgaacagttgcaggaagatttacgtcatccggtttttccgctttatctggggcgaaaaagtcatccgctggcgttaccacttgcgccgttactgctcgaaggcaacgcgtctgatgtcttacgtaacgcataccaacagtatcaggatcgtttccacgaactgaaagtctcactcccgaaacttcaggatgaatgctggtgggaaggggagcacgacggcctggtcgcgagcaaaatattgcgccgccgggatgttcctttaaatcgccagcagtggctgtttggggaacgcaccgtcaatcaggggccgtggctcagcaaggaggaaccatgtacctctcaagaataa

SEQ ID NO: 98 - DNA, 492 bp, artificial
  Centroid sequence
gggggggggcgcttttttgtcctgtcgcaggaacgcccggcggaaagtgatattttcaccatcgaatgccgaccatttgcgccagagttgcgtaccggacaatccctttgtttcaacctgcgggcgaatccaacaatttgtaaagcgggcaaacgccacgacttgctgatggaggcgaaacggcaggtgagggggcaggtggaaggaagtgatgtctggttgcatcaacaacaggctgcgctggactggctggcagcgcagggggagagaagcggttttacactgctggatacttcggttgatgcctaccgacaacagcaactgcggcgggaaaactcccggcaactgatccagttcagtagcgtggattatacggggatgcttacggtcaccgctcctgggttatttctgcaacgtctcagtcaggggtatggcaaaagccgggcgttcggttgtggtctgatgctgatcaaacccggagcagaggcgtga

SEQ ID NO: 99 - DNA, 603 bp, artificial
  Centroid sequence
atgaagaataaggctgataacaaaaaaaggaacttcctgacccatagtgaaatcgaatcactccttaaagcagcaaataccgggcctcatgcagcacgtaattattgtctgactttgctttgttttattcatggtttccgggcgagtgaaatttgtcgattgaggatttcggatattgatcttaaggcaaagtgtatatatatccatcgattaaaaaaaggcttttcaacaacgcacccgctattgaacaaagaagttcaggctttaaaaaactggttgagtatccgtacttcttatccgcatgctgagagcgagtgggtatttttatcgcgtaaggggaatccgctttctcggcaacaattttaccatattatctcgacttccggtggtaatgccgggttgtcactggagattcatccgcacatgttacgccattcgtgtggttttgctttggcgaatatgggaatagatacgcgacttatccaggattatcttgggcatcgcaatattcgtcatactgtctggtatactgccagcaatgcagggcgtttttacggcatctgggatagagccagaggacgacagcgtcacgctgttttatag

SEQ ID NO: 100 - DNA, 606 bp, artificial
  Centroid sequence
atgagtataaaaaatctacctgccgactatttattggctgcacaacagggtgatatcgataaagtaaaaacctgccttgcgctgggtgtcgatattaatacctgcgatcgtcaggggaaaacggcaattacgctggcaagtttatatcagcaatatgcttgcgttcaggcattaattgatgccggagcggatattaataagcaagatcatacctgtttaaatccttttttaattagctgtctgaacgatgatttaacgctactacgaattattttaccggctaaacccgatcttaattgcgtaacccgttttggcggtgtcggcctgacgcctgcctgtgaaaaaggccatttaagtattgtaaaagagcttttggcgcatacggagattaacgttaaccagaccaaccatgtaggctggacgccgctactggaagcgattgtgcttaatgatggtggtattaaacagcaggcgattgtgcagttattgctggaacacggtgccagcccgcatctgaccgataaatatggcaaaacgccactggaactggcgcgggaacggggctttgaagagattgcgcagttactgattgccgcaggtgcataa

SEQ ID NO: 101 - DNA, 1473 bp, artificial
  Centroid sequence
atgtcccgaatggcagaacagcagctttatattaatggtggttatacatcggccaccagcggtcgcaccttcgagaccatcaaccctgccactggcgaggtgctggcgaccgttcaggctgccggacgcgaggatgtcgaccgcgccgtcgagagcgcgcagcgtgggcaaaaaatctgggcggcgatgaccgccatggaacgctcgcgtatcctgcgtcgcgccgtcgaccttctgcgccagcgcaacgacgagctggcgcggctggagacgctggataccgggaaacctctcagcgaaaccgccgccgtcgatatcgtcaccggcgccgacgtgctggagtattacgccggattgatcccggcgctggaaggcagccagatcccgctgcgcgacagttccttcgtctacacccgtcgcgaaccgctgggggtggtagccgggatcggcgcgtggaactacccgatccagatcgccctgtggaaatcggcgccagcgctggccgctggcaatgcgatgattttcaaaccgagcgaagtcaccccgctgaccgccctcaagctggcggaaatttacagcgaagcgggcctgccggacggggtgtttaacgtcctgccagggatcggcgcggaaaccggccagtatctgaccgagcatccggacatcgccaaaatctccttcaccggcggcgtcgccagcggcaaaaaagtgatggccaactcggccgcttcatcactgaaagaggtcaccatggagctgggcggcaaatcgccgctgattatcgccgatgatgccgacctcgacctcgccgccgatattgccatgatggccaacttttacagctccggccaggtgtgcaccaacggcacccgggtatttgtcccggcgaaacggaaggcggaattcgagcacaagatcctcgagcgggtggcccgcatccgcgccggcgatctgtttgccgacgacaccaacttcggcccgctggtcagcttcccccaccgcgacaacgttctgcgctatatcgagagcggcaaacgcgaaggcgcgcgcctgctgtgcggcggcgaggcgctgaaaggcgacggtttcgataacggcgcgtgggtcgccccgacagtgtttaccgattgcagcgacgagatgaccatcgtgcgcgaagagatcttcggcccggtgatgtcgatcctcagctatgccgacgaagcggaggtcattcgccgcgccaacgccaccgaatacggcctcgccgccggcgtggtgacgcccaacctcaaccgcgctcaccgaattatccaccagctggaagccggcatctgctggatcaacagctggggggaatccccggcggaaatgccggttggcggctacaaacactccggcattggccgcgagaacggcgtgatgacgctgcagagttacacccaggtgaagtccatccaggttgagatgggtaaattccagtccatattttaa

SEQ ID NO: 102 - DNA, 2130 bp, artificial
  Centroid sequence
ttgttgtcgagcgagtcgaacactggcgcgagctccaccagcagcgttttaaagaacggcataatcttcgcgctgccgcgctcaaacatattgcggttctggtcgtctttaattagcacgcgcaatccctgcgggacaatctccatctccagattcgcttccatatgcgcatcacgggcgatggtgttgatactggtcgccagctcgccaagctcagtggcggacttcttcttcagtagcgccgttttctcgttgacgtcgcgcgcttttttctccgtctcttccggcaccgccacggtggcaggtttcggcggatgcgtagggctgattttatttaacggcgacagcccgccgccattgaaaatcgactgcccgtgcagcgcggcgataatgctttcacgctcggatttactgacgctgttcactatcaactttatcgtcgtcaccaaaggggccgagcgtatttccgaggtttctgcccgctttaccctggacgcgatgcccggcaagcagatggcgattgacgccgatcttaacgccgggttgatcaaccaggcgcaggcgcaaacccggcgtaaagatgttgccagcgaggccgatttctacggtgcaatggacggggcatcgaagtttgtgcgcggggatgccatcgccgggatgatgattctggcgatcaacctgatcggcggcgtctgtatcgggatcttcaaatacaacctgagcgccgacgccgccttccagcagtatgtgctgatgaccatcggcgacgggctggtggcgcagatcccgtccctgctgctctccaccgcggcggcaattatcgtcacccgcgtcagcgacaacggcgatatcgcccatgacgtgcgccaccagctgctggcaagcccgtcggtgctctacaccgccaccgggatcatgtttgtgctggcggtggtgccggggatgccgcacctgccgtttttgctgttcagcgccctgcttggctttaccggctggcggatgagcaaacgcccgcaggcggcggaggcggaagagaaaagcctcgaaacgctgacccgcaccatcaccgaaaccagcgagcaacaggtcagttgggaaaccattccgctgatcgagcccatcagcttaagcctcggttacaagttggtggcgctggtggacaaagcgcagggcaacccgctcacccagcggattcgcggcgtgcggcaggtgatttccgacggcaacggcgtgctgctgccggagatccgcattcgcgaaaacttccgcctcaagcccagccagtacgccattttcatcaacggcattaaggctgatgaagctgatattccggcggataaactgatggccctgccctccagtgaaacctacggtgagattgacggcgtgctggggaacgacccggcgtatgggatgccggtcacctggatccagcctacgcagaaagcgaaagcgctgaatatggggtatcaggtgatcgacagcgccagcgtaattgccacacatgtgaataagattgtgcgcagctatattcctgatttgtttaactatgacgatattactcagctgcataaccgtttgtcgtcgatggcaccgcgcctgtcggaggatttgagcgcggcgctgaattacagccagttgctgaaagtgtaccgggcgctactgactgaaggcgtttccctgcgcgatatcgtcaccatcgccaccgtgctggtcgccagtagcaccgtcaccaaagatcatattctgctggcggccgatgtgcgcctggcactgcggcggagcattacccatccgttcgttcgcaagcaggagctgacggtgtatacgctgaataatgagctggaaaatctgctgaccaatgtggtgaatcaggcgcaacaggctggcaaagtgatgctcgacagcgtgccggtggacccgaatatgctcaaccagttccagaacacgatgccgcaggtgaaagagcagatgaaagcggcagggaaagatccggtgctgctggtgccgccgcagttgcgcccgttgctggcgcgttatgcgaagttgtttgcgccggggttgcatgtgctgtcgtataacgaagtgccggacgagctggagttgaagattatgggggcgttgagttga

SEQ ID NO: 103 - DNA, 3522 bp, artificial
  Centroid sequence
gtgttcagattaccaacaccccgactattcagcggactcaaatcagtcctgcgcccggcgatgccccggtttaaggtttctgcattctggctgctgatactggcgtggattttcctgctggtgtggatctggtggaaaggcccgacgtggacgctgtatgaagaacagtggctcaaaccactggctaaccgctggctggcaacggcagcatgggggattattgccctggtgtggcttactgtccgggtaatgaagcgcctgcaacagcttgaaaaacagcaaaaacagcagcgcgaagaggccgttgatccgctcagcgtggagctgaacgcccagcagcgttacctcgaccgctggttactgcgcctgcaacgccatctcgacaaccgccgctacctgtggcagttgccctggtatatggttatcggtccggcgggcagtggcaaaacgacactgctgcgcgagggttttccgtctgacataatttatacccccgaagcggtgcgtggggcggagccgcgcctgtatctcatcccgcatgtcgggcaacaggcggtgatattcgatattgatggctcgctctgtgaacagccggatgcaaatgtgttgcaccgccggttatgggaacataccctgggctggctggtagagaagcgcgcccgtcagccgctgaacggactcattttgaccctcgatttacctgacctgctgaccgccgacaagcgccgccgtgagtatctgctacagacgctgcgcagccgcctccaggatgtacgccagcagcttcactgccagttgccggtctatgtggtgctgacccggctggatctgctgcatggttttgccacgctgtttcagtcactggataaaaaagatcgtgacaccattctgggcgtcacgttcacccgtcgtgcccatgaaaacgaggactggcgaagcgaacttaatgccttctggcagtcgtggtgtgaccgaatgaaccaggcgctgccggatctgatgctggcgcagagccatatgcgtggctccctgtttagctttgcccgccagatgcagggaagccaggaatccctggtggcgctgctggatggattgctggatggggaaaacatggatgtcatgctgcgcggggtctatctcacctcgtccctgcaacgcggccagatggatgacatctttactcagtccgcagctcgccagtaccggctgggcagcagcccgctgacggcctggccgctggtggataccacgccgtatttcacccgcaacctgtttccgcaggcattactggcagagcctaacctggcaacggagagccggacctggctgaccagcagtcgtcgccgcctgaccatcttttccgcaacgggcggcgtggcggcgctgctgttaatcactggctggcaccattattacaatgacaactatacctccggcgtccaggtgctgaagcaggctaaagcgtttatggatatcacgcccccgcaggggatggatgactatggcaacctgcaactgccgctgctgaacccggtacgtgatgccactctcgcctatggtgactggggcgaccgaagccgcctggcggatatggggttataccaggggcggcgtgtcgggccgtatgtggagcagacctacctgcaattgctggagcagcgttatttgcccgccctgtttaacgggctggtgaaagagatgaacaccgcgccgccagagagcgaggaaaaactcgctgtgctgcgcgtgatacgaatgctggaggataaaagcggacgcaataatgaggtggtgaagcagtatatggcgaaacgctggagcgaaaagttccacggccagcgcgatatccaggcgcaactgatgtcccatcttgattacgcgctggcgcacacggactggcacgcagagcgtcaggcgggagacagtgatgccatcaaccgctggataccttatgacaagtcagttgtgtcagcacagaaagaacttagcaaactgtcggtttaccagcgggtttaccagagtctgaaaacgcgggcgctgggcgtactgccagcagatcttaacctgcgcgaccaggtggggccgacctttgagcaggtgttcacatctgccgatgacaacaaactggttgttccgcagtttctcacccgttacggcctgcaacgctactttgtgaagcagcgcgatgaactggtggaactgaccgcgctggactcctgggtactgaacatcactcataacgtgaagtacagcgacgctgaccggacagagattcagcgtcagttgactgaacagtatctcagtgactacaccgctacctggcgggccgggatggataatcttaacgtcaggaattatgtgtccattgcgcaactgaccagtgcgctggagcagataatcagcggtgaccagccacttcagcgagcgctgactgccctgcgtgataacacgcagcctgcggtactctctgaaaaaatttctgataaagaacgggagaatgcactggcggagccggacttccgcctgctgacccgcctcgggcatgaattcgccccggaaaacagcacgctcgcggtacagaaggataaagaaagtaccatgcaggcggtgtaccagcagttaacggaactgcaccgctatctgctggcgatccagaacgcgccggtgccggggaaatcggcgctgaaagctgtccagctacgtctggaccagaacagcagcgacccgatattcgccacccgccagatggcgaaaaccctgcccgcgccacttaaccgctgggtgggcaagctggccgaccaggcctggcatgtggtgatggtggaggccgttcactatatggaaattgactggcgtgacaacgtggtgaaaccgttcaatgaacagcttgccggtaactatccgtttaatccgcgctcggcgcaggatgcttcactggatgcgtttgaacgtttctttaaaccggatggcgtgctggacacattctggcagcagaatctgaaactgtttattgaaaatgacctgagccgtgatggcgataacggggtgattatccgcgaggacatcatccggcaactggatactgcacagaagattcgcgacatcttcttcagtaaacaaaacggcctgggaacgcagtttgcggtggaaacggtatcgctctccggcaataaacgccgcagcgtgctgaacctcgatggtcagttagtcgattacagccagggccgcaactataccgcccacctggtctggccgaacaacatgcgggaaggcaatgaaagcaaactgacgctgataggcgtcagtggcggagcgccgcgcagtatccgtttcaccgggccgtgggcgcagttccgcctgttcggggcagggcagttaaccagcgttgaggcagggacattcagcgtgcggtttaacgtggacggtggcgcgatggtctaccggatacacgctgacaccgaggacaatccattcagtggcgggcttttcagccagttcaggctgtcggacacgctgtactga

SEQ ID NO: 104 - DNA, 606 bp, artificial
  Centroid sequence
atgaatggagtggcgaaaatgcccaaattggggatgcagtcgatccggcgcagacaactgatcgacgccacgctggaagcaataaatgaagtgggcatgcacgatgcaacgatcgcgcagatcgcccgccgtgcaggcgtttctacggggatcatcagccactatttcagggacaaaaatggcctgctggaagcaaccatgcgcgatatcaccagtcagctgcgtgacgcggttttgaatcgattacatgcacttccgcagggcagtgcagagcagcgattacaggcgattgttgacgggaatttcgatgagactcaggtgagcggcgcggcgatgaaagcctggctggcgttttgggccagcagcatgcatcagccgatgctgtatcgcttacagcaggtcagcagtcgccgtttgctgtcgaatctggtgagcgaatttcgccgcgagttaccgcgccaacaggcacaggaagcgggctacggcctggccgcgctgattgatggattatggctgcgcgcggctctgagcgggaaaccgctggataaaacccgcgctaattccctgacccgccactttatcactcagcatctacccaccgattaa

SEQ ID NO: 105 - DNA, 3465 bp, artificial
  Centroid sequence
atgccccggtttaaagtctccgctttctggctgctgatactggcgtggatttttctgctggtatggatctggtggaaaggcccgacgtggacgctgtatgaagaacagtggctcaaaccactggcgaaccgctggctggcaacggcggcatgggggattatcgccctagtgtggcttaccgtccggatgatgaagcgcctgcaacagcttgaaaaaatgcaaaagcagcagcgcgaggaggccattgatccgctcagtgtggagctgaacgcccagcagcgttaccttgaccgctggctgctgcgcctgcaacgccatctcgacaaccgccgtttcctgtggcagttgccgtggtatatggtcatcggcccggcgggcagtggcaaaacgacactgctgcgcgagggttttccgtccgacattatttatgccccggagggcgcacgcggcgcagaacaacgcctgtacctcacgccccatgtcggtaaacaggcggtgatctttgatatcgacggcacactctgcgctcccgctgatgcggatatcctgcatcgccgtctgtgggaacatgccctcggctggctgaaagaaaagcgcgcgcgccagccgctgaacgggattattctgacactcgatttacccgatctgcttaccgcagacaaacgccgccgcgaacatctgttacagacgctgcgcagccgcttgcaggatatacgccagcatcttcactgccagttaccggtttacgtggtactcacccggcttgatttattgcagggttttgccgccctgttccagtcactgaacagacaggatcgcgatgcaattctaggggtcacgttcacccgccgcgcccatgaaaatgatgactggcgaacagagttgaatgctttctggcagacatgggtggatcgaatgaacctagcgttgccggatctgatggtcgctcagactcacacccgcgcgtctttatttagtttttcccgccagatgcagggaagccgtgaaccactggtgtcactgcttgagggtctgcttgacggcgaaaatatgaacgtgatgctgcgtggcgtctatctcacctcttcgcttcagcgcggacagatggatgatattttcacccagtctgccgcccgccaataccggctgggcaataacccactggcgtcctggcctctggtggacaccgcaccctatttcacccgtagcctgttcccgcaggcattactcgcagagcctaatctggcaacagaaagccgcacctggctgatgcgttcccgtcgccgcctgacggttttctctaccacaggaggcgtggcggcactgctgctcatcaccggctggcatcactattacaacggtaactatcagtccggcatcaccgtgcttaagcaggcaaaagcctttatggatgtaccgcctccgctgggggaagatgattacggcaacctgcaactgccgctgctgaacccggtacgcgatgccacgctggcctatggcgactggggcgaccgcagccgtctggccgatatgggactgtaccagggacggcgtatcgggccttatgtggaacaaacctatctgcaactgctggagcagcgttacctgccttcgctgtttaacgggctggtcaaagcgatgaacgccgcgccgccggagagtgaggaaaaactcgccgtgctgcgtgtgatgcgaatgctggaggacaaaagcggacgcaataatgaggtggtgaagcagtatatggcaaaacgctggagcgaaaaattccacggccagcgcgatatccaggcacaactgatgtcccatcttgactacgcgctggctcatactgactggcatgcagagcgtcaggcgggcgacggtgatgccatcagccgctggacgccatatgacaagcctgttgcgacagcacagaaagaactgagcaaactgcctgtctaccagcgagtttaccagagcctgaaaacgcgggcgctgggcgttcttcctgccgacctcaatctgcgtgaccaggtagggccaacttttgaccaggtatttacatctgccgatgataacaaactggttgttccacagtttcttacccgttacggcctgcaaagctattttgtaaaacagcgcgatgaactggttgaactgacggcgatggattcctgggtactcaacctcacccgcagcgtgaaatacagtgacgccgaccgcgcggaaatccagcgccagttgaccgagcagtatatcagcgactacaccgccacctggcgggccgggatggacaatctgaatatccgcaattttgagtccatcggacaactgaccggggcgctggagcaggttatcagcggcgaccagcctttgcagcgggcgctgaccgtgctgcgtgacaacacacagccaggcgtcttttctgaaaaactctctgccaaagagcgggatgagaccctggcagagccggattaccagttactcacccgcctcgggcatgaattcgccccggaaaacagtaccctgacagtacagaaagacaaagaaagcacgatgcaggccgtataccagcagctcaccgagttacaccgctacctgctggcaatccagaacgcgcctgtaccagggaaatcggcgctgaaagccgtgcagttaaggcttgatcagaacagcagcgatccaatattcgccacccgccagatggcaaaaacactgcctgctccgctcaaccgctgggtaggcaggctggctgaccaggcctggcatgtggtgatggtggaagccgttcactatatggaagtggactggcgcgacagcgtggtgaaaccgtttaacgagcaactggcaaataactatccgtttaatccacattctgcacaggatgcctcactggatgccttcgaacgattctttaaaccagatggcatactggataccttctaccagcagaacctaaagctgtttatcgacaatgacctgagtctggaggatggcgataacaacgtcattattcgcgaagatattattgcgcaactggaaaccgcgcagaaaatccgtgacatattcttcagcaaacagaacggtctgggaacatcctttgccgtggaaacggtatcgctttccggcaacaaacgccgcagcgtactgaaccttgacggtcagttagtcgattacagccagggccgtaactataccgcccatctggtctggcctaacaatatgcgcgaaggcaacgaaagcaaactgacgctggttggtgcccgcggcggcgcaccgcgcagtatcagcttcagcgggccgtgggctcagttccgcctgttcggggccggacagctgaccggagtacaggatggcaactttaccgtgcgctttagtgtggacggtggcgcaatgacctaccgcgtgcataccgacacggaagataacccgttcagcggtgggttattcagccagtttggcctgtcagacacactgtactga

SEQ ID NO: 106 - DNA, 2034 bp, artificial
  Centroid sequence
atgacggacctttcacacagcagggaaaaggacaaaatcaatccggtggtgttttacacttccgccggattgattttgttgttttccctgacaacgatcctgtttcgcgacttctcggccctgtggattggccgcacgctggactgggtttctaaaaccttcggttggtactatctgctggcggcaacgctctatattgtctttgtggtctgtatcgcttgttcgcgttttggttcggtgaagctcgggccagaacaatccaaaccggaattcagtctgctgagttgggcggcgatgctgtttgctgccgggatcggtatcgacctgatgttcttctccgtagccgaatcggtaacgcagtatatgcagccgccggaaggcgcgggacagacgattgaggccgcgcgtcaggcgatggtctggacgctgtttcactacggcttaaccggctggtcgatgtatgcgctgatgggcatggcgctcggatactttagttatcgttataatttgcctctcaccatcctctcggcgctgtacccgatcttcggtaaacggattaacgggccgatagggcactcagtggatatcgcagcggtgatcggcactatcttcggtattgccactacgctcggtatcggtgtggtgcagcttaactatggcttgagcgtactgttggatattcccgattctatggcggcaaaagcggcactgatcgccttgtcggtgataatcgccacgatctctgtcacctccggtgtcgataaggggattcgtgtgttatcggaacttaacgttgcgctggcgctgggattgatcctgttcgtattgtttatgggcgacacctcattcctgcttaatgcgctggtgctgaatgttggcgactatgtgaatcgctttatgggcatgacgctcaacagttttgccttcgaccgtccggttgagtggatgaataactggacgctcttcttctgggcatggtgggtggcatggtcgccgtttgtcggcttgttcctggcgcgtatctcgcgtgggcgtaccattcgccagttcgtgctgggcacgttgattattccgtttaccttcacgctgttatggctctcggtgttcggcaatagcgcgctgtatgaaatcatccacggcggcgcggcatttgccgaggaagcgatggtccatccggagcgcggcttctacagcctgctggcgcagtatccggcgtttacctttagcgcctccgtcgccaccattactggcctgctgttttatgtgacctcggcggactccggtgcgctggtgctggggaatttcacctcgcagcttaaagatatcaacagcgacgcccccggctggctgcgcgtcttctggtcggtggcgattggtctgctgacgctcggcatgctgatgaccaacgggatatccgcgctgcaaaacaccacggtaatcatggggctgccgttcagctttgtgattttcttcgtgatggcggggttgtataaatctctgaaggtagaagattaccgccgtgaaagtgccaaccgcgataccgcgccgcgaccgctggggcttcaggatcgcctgagctggaaaaaacgtctctcgcgcctgatgaattatccgggcacgcgttacactaaacagatgatggagacggtctgttacccggcaatggaagaagtggcgcaggagttgcggttgcgcggcgcgtacgtggagctaaaaagcctgccgccggaagagggacaacagttggggcatctggatttgttggtgcatatgggcgaagagcaaaactttgtctatcagatttggccgcagcaatattcggtgccgggctttacctaccgcgcacgtagcggtaaatcgacttactaccggctggaaactttcctgttagaaggcagccagggcaacgacctgatggactacagcaaagagcaggtgatcaccgatattcttgaccagtacgagcggcaccttaactttattcatctccatcgtgaagcgccgggccatagcgtgatgttcccggacgcgtga

SEQ ID NO: 107 - DNA, 2850 bp, artificial
  Centroid sequence
atgtccggcagtgcttttgccgttacgcaccacgccttcagtagcggagcaggaaggacatctgatggaaatggaagccacgcaagcaccttaaaatcaccatcatacactaaatcagtaagttggcagcattacctagtatttgttatggatttcaggattgccatggataaaaaattactggctcttttgatcctggcgagtctcagcccggcagaggcgacattaaccaaaattcccgcagggtttgaggttattgctcagggacagcaggagtatatcgaggtttatttttcagggaaaagtctcggtaaatattatgcaatggttaatcttgataccgtaacatttcttgatccagcaagtctatataacaagctggaactggatgtagacgatcagaaaatcgcgcatatagtgaaagaaaaattatcgcagccgctagctcgccacggtgaattggcttgcggttatgtacgtactgactcagggtgtggttttctgaataccgatacgctggaaataatctataatgatgaagaaagttcggcaacgttgtttattaatccgcaatggaattcagctttcgatgcgaagtcattatatttaaatccagacaaaaatactgttaacgcttttatacatcagcaagacatcaatgttctggcacaggatgattaccaatcgttgtctattcagggaaacggtgcgctgggaataacagaaaatagctatattggtgcacactggaatttcaacggttatgatgcagatgatgtcagtgacagtaatactgacgtcagcgatctctattatcgttatgattttttacgtcgttattatgtgcaggcgggtcgcatggacaaccgcacactatttaatgcacaaggcgggaactttacctttaactttctgccactcggtgcaatcgatgggatgcgtatcgggtcgacactgagctatttaaaccaggcgcaaagccagcaaggaaccccagtaatggttctgctttcgcgcaattctcgtgttgacgcttatcgtaatgagcaacttttgggatcgttttatctcaatagtggttcgcaatttattgataccagttcctttccgccaggcagctacagcgtggcattaaaagtctacgaaaataaccaactcacccgcaccgagcttgtaccgtttaccaaaaccggcggtctgattgacggaaatgcgcaatggttcttacaggcaggtaaaactacatcacaggtttctgatgatgaaagttcagcttatcagctaggagtacgcctgccattacatccgcaatatgagctctacgcagggctggcgaatgccgatgatgtgagtgctttcgagttaggtaataactggacggcagatttaggcggggtggggaatcttgcaatcagcgccagcgtgttccgtaacgatgacggcggcaaaggtgatatgcaacaggccaactggagtaatccgggatggccgacgttgggcttttatcggaccaactctgacggcgatgcttgtacaaccgacagcagagagagctataacgccttaagctgttatgaaagtatttccgcgacagtttcactgaattttgtcggctggaatatgatgctgggttatacctgcacacaaaataacactgatgatagtttgcgttgggataaacagcagagctttgaaaataactatcttcgccagacaacagcgcaaagtatctctgaaactgtacaacttagcgcttcccgcgctattgtgatgcgtgactggattttgagtacgtcagtcggtgttttccatcgtaatgacaacggtggcgataacgacgacaacggcttgtacttatcgttttcgttatctgacacgccaacgatggatagcaataacaacagccattcaaccaatgtgcctacggattatcgttatagcgaacaggatggcgatcaaacgtcatggcagttatcgcataccttttataacgattcattcagccataaagaacttggcgtaaccgtcggaggcctgaacaccgataccataaacagcgcggttaacgggcgttgggatgggcaatacggaaatgtctacgctaccgtatctgatagttatgaccgtaagaatcatgatcatctttcggcctttacgggcacttatagctctacgctggctgtcagtcgctatggcgttaatttgggagccagtggtacagacgatttgctgggtgcggtactggtggatgtgaaaggcttctctgaacaggatgaagagagtcaggatctgcaactcgaagcgcgggtggcaggcagccgaactttgcagcttggtcaaagtgacagtgtgttgttcccttatcctggatttcagtctggttttgttgaggttaacgacagtagccagggcaatcagcaggggacaacaaacatcattaacggtgcagggaatcgtgaattaatgttgttgcctggcaagctgcgctatcgcgaagtgtctgccagctttaactacaactatatcggtcgtttattactgccggcagcggtgaaaaaattcccgattgtggggctgaacagcgccatgttactggtagctgaagatggcggatttacacttgaaattaacggcagcgaaaaagagctctatctgctttccgggcagcaattccttaagtgtccactgagtgttgtaaagaaacgcgccagcattcgttacagcggagatgttacttgtagtgtggtgacttattcacaattaccggagtcgattcaggttcaggcacagttgaaacagcctaaattacgtggaaacgttcagacggcgcaaagggaggttgcaccatga

SEQ ID NO: 108 - DNA, 1536 bp, artificial
  Centroid sequence
atggcaagctaccattgcaccgttaaaaccggagcaaaaggcgcagccttaaaacatgctgattacatttccagatccggcgaatataagagctacaaatcgcgggaggatctggagttttcgtcatccggtaacatgccatcatgggcgaagaaaaatcccgcagaactgtggaaagccgcagatgaatttgaacgaaaaaacgggacggcataccgtgaaattgagatcgcattaccgcgtgaactgacacgcgaacaacggatagaacttgttgaagatttcgtgcaaaaggaacttggcaatcgccatgcctaccagtacgcgatccacaatccgccaggtgcaatcgacggaaaggaacagccacacgcgcatatcatgttttgcgagcggattaatgatggtattgaacgcgatccgcagcaattttttaaacgcgccaacagcaaatcaccggagcggggaggcgcaaaaaaggcgagtattccccagaccgccggagagcgaaaagccgcccttgttgcgctacgttcccgctgggctgatgtgcagaatgagcaccttgcgcgacacggtcacgagtcgcgcgtagatcatcgttcgctgaaagaacagggcatcaagcgcacgccggaagttcatcttggccctgttcacgccgccaatctgaacgaggggcagatcgcggcaattcaggagcacagggcggcgcgtcagcaagaacgcgcagcacgcaacccagcgccagagcgccaacaggaactggagcaaaagcaaaaaatcaggacagttgagcgttcaccggagttactggctcagtaccgcaaggttatgaaaacggtcattcagggagaggaaaggcttgctcgtttaggggatgccaaccccgatgcgctcaaagaacataagctgcttcagaatgcgaaagctaaaaaagaatctctttccgaatggagcaggcgaatatatgaaggggcacggtatttagacaaactggggcgtaatgttgtttccgcacaaagggagctgcgggagctacaggaacaacgcaatgctttgaatgggattcgtggcctgtttcggggggctgacaaaagggagattgatgcgcgtattctggagcaaaaaagtgtgctggaaaccgctgaacatgaaaggaatgaattcaggaacaagctacagcaagccgaatccgagtgggacaaagaaaacgccgcttttaagcgtaccgagggatataagtacgttggggatctggacaggtacagagaacgtgagattctggccgcggcatctttagagaataccaggcaaaaggttgctgaagaagtatccgttgcccgtagccagatgttatctctggagcctgaactcagtatgtctggagatgaaaaagctcaaatgcgacatgagttactggcagaaatggcacaggaaaggcagcaacaagaagaatacgcacggcgtatacagcaatctttggctagaggaatgttaaatagtaaggagcgtgatcagggtattgaacgataa

SEQ ID NO: 109 - DNA, 774 bp, artificial
  Centroid sequence
atgagtatggttgatactgctccgggtaagattcaggttcgtgatttgaacttctactatggcaaattccatgccctgaagaacatcaacctggatattgctaaaaatcaggtaacggcgtttattggaccgtcaggctgtggtaaatcgacgctgctgcgtaccttcaacaaaatgtttgaactgtacccggagcagcgtgcggaaggtgaaattctgctggatggcgacaatattctcaccaacacgcaggatatcgccctgctgcgtgccaaagtaggcatggtgttccagaagccaacgccgttcccgatgtccatctacgacaatatcgcgtttggcgtgcgtctgtttgagaaactctctcgtgcggatatggacgagcgcgtgcagtgggcattgaccaaagccgcattatggaacgaaaccaaagataaattacaccagagtgggtactctctctccggtggtcagcagcagcgtctgtgcattgcgcgcggtatcgccattcgtccggaagtgcttctgctggatgagccatgttcagcgctcgaccctatttctaccgggcgtatcgaagagctgatcacggaactgaaagaagactacaccgtcgttatcgtgacacacaacatgcagcaggctgcgcgttgttccgatcacacggcattcatgtacctgggcgagttgattgagttcagcaacacggacgatctgttcaccaagcccgcgaagaaacaaactgaagattacatcaccggtcgttacggctga

SEQ ID NO: 110 - DNA, 726 bp, artificial
  Centroid sequence
atggacagtctcaatcttaataaacatatttccggccagttcaacgccgaactggaaagcatccgcacgcaggtgatgaccatgggcggcatggtggagcagcagctttctgatgcaatcaccgcgatgcataaccaggacagcgatctggcgaagcgcgtcatcgaaggcgacaagaacgtcaacatgatggaagtggcgatcgatgaagcctgcgtgcgcattatcgccaaacgtcagccgacggcgagcgacctgcgtctggtgatggtgatcagtaaaaccattgccgagctggagcgtattggcgacgtggcggacaaaatctgccgtactgcgctggagaaattctcccagcagcatcagccgttgctggtaagtctggagtcgctgggccgtcataccatccagatgctgcacgacgtgctggacgcgttcgcgcggatggatattgacgaagcggtgcgaatttatcgggaagataaaaaagtcgatcaggagtacgaaggtattgttcgtcaactgatgacctacatgatggaagattcgcgcaccattccgagcgtccttaccgcgctgttctgtgcgcgttcaatcgaacgtatcggcgaccgttgccagaatatttgtgagtttatcttctactacgtgaaggggcaggatttccgtcacgtcggtggtgacgagctcgataaactgcttgcagaaaaagatagcgataaataa

SEQ ID NO: 111 - DNA, 885 bp, artificial
  Centroid sequence
atggttgaaatgcaaaccactgcggcgctggcggaatcccgccgcaaaatgcaggcgcgtcgccgcctcaaaaaccgtattgcgctgacgctctcgatggcgacgatggccttcggtctgttctggctgatctggattttaatgtccaccatcacccgcggtatcgacggtatgtcgctggcgctgtttactgaaatgacgccgccgcccaatacggaaggtggtggtctggcgaacgctctggcgggtagcgggctgttaattttgtgggccacggtattcggtacgccgctgggcattatggcggggatttatctggctgaatatggtcgtaaatcttggctggcagaagtgattcgcttcattaacgacattctgctctctgcgccgtcgattgtggttggtctgtttgtttacaccattgtggtggcgcagatggagcacttctccggttgggcgggtgtgattgccctggcgctgttgcaggtaccgattgttatccgcaccaccgagaacatgctgaaactggtgccggacagcctgcgtgaagcggcttatgcgctgggtacgccgaagtggaagatgatctccgcgatcacgctgaaagcgtcggtgtccgggattatgaccggtatcctgctggcgattgcccgtattgctggtgaaaccgcgccgctgctgtttaccgcgctctccaaccagttctggagcacggacatgatgcaaccgatcgccaacctgccggtaacgatctttaagtttgcgatgagtccgtttgcggaatggcagcaactggcctgggccggggtattgatcattaccctgtgcgtactgctgctgaacattctggcgcgcgttgtttttgtgaagaataaacacggttga

SEQ ID NO: 112 - DNA, 960 bp, artificial
  Centroid sequence
atggctgcaaccaagcctgcttttaacccaccgggtaaaaagggcgacataattttcagcgtgctggtaaaactggcggcgctgattgtgctattgatgttgggtggcattattgtctctctgatcatctcctcctggccgagcattcagaaatttggtctggctttcctatggaccaaagagtgggatgcaccgaacgatatctacggggcgctggtgccgatctacggtacgttggtgacttcgtttatcgcgctgctgatcgccgtcccggtgagtttcggtatcgccctgttcctgactgagcttgcgcctggctggctgaaacgcccgctgggtatcgccattgagctgctggcagccattccaagtatcgtttacggcatgtggggcctgtttatctttgcgccgctgttcgccgtttactttcaggagccggtcggcaatatcatgtcgaatatcccgattgttggcgcgctgttctctggccccgcatttggtatcggtatcctcgcggcaggcgtgatcctcgccatcatgattattccgtacattgcggcggtaatgcgtgatgtgttcgaacaaaccccggtgatgatgaaagagtcggcctacggtattggctgcaccacctgggaagttatctggcgtatcgttcttccgttcaccaaaaatggtgttatcggcggcatcatgctggggctgggccgcgcgctcggtgaaaccatggcggtgacctttatcatcggtaacacctaccagctcgacagcgcctcgctgtacatgccgggcaatagtatcacctctgcgttggcgaacgaatttgcggaagcggaatccggtctgcacgttgccgcactgatggaactgggcctgatcctgtttgtgattaccttcatcgtcctcgccgcatcgaagtttatgattatgcgcctggctaagaatgagggggcacgctaa

SEQ ID NO: 113 - DNA, 1041 bp, artificial
  Centroid sequence
atgaaagttatgcgtaccaccgtcgcaacttttgtcgccgcgaccttatcgatgagcgctttctctgtgtttgcagaagcaagcctgacaggtgcaggtgcaaccttccctgcgccggtgtatgccaaatgggctgacacttaccagaaagaaaccggtaataaagttaactaccagggtatcggttcttccggcggcgtaaaacagattatcgccaataccgttgattttggtgcctctgacgcgccgctgtctgacgaaaaactggctcaggaaggtctgttccagttcccgaccgtaattggcggcgtggtgctggcggttaacattccggggctaaaatctggcgaactggtgctggatggtaaaacccttggcgacatctacctgggcaaaatcaaaaagtgggatgatgaagccatcgccaaactgaatccgggtctgaaactgccttcacagaacattgctgtagtgcgccgtgcagatggctccgggacatcctttgtcttcaccagctatctggcgaaagtgaacgaagagtggaaaaacaacgtcggtactggctctaccgtaaaatggccgattggtctgggtggtaaaggaaacgacggtatcgccgcgttcgttcagcgtctgccgggtgcaattggttatgttgaatatgcttacgctaagcagaacaacctggcgtacaccaaactgatctccgctgatggtaaacctgtttcgccgaccgaagaaaactttgccaatgcggcaaaaggcgcagactggagcaaaacattcgctcaggatctgaccaaccagaaaggcgaagatgcgtggcctattacctctaccacgttcattcttgtccacaaagatcagaagaaaccagagcagggcacagaagtgctgaaattcttcgactgggcgtataaaaccggggctaaacaggcgaacgacctggattacgccagcctgccggatagcgtagttgaacaggttcgcgctgcgtggaagaccaatattaaagacagtagcggcaagccgctgtactaa

SEQ ID NO: 114 - DNA, 678 bp, artificial
  Centroid sequence
atgtttatcagtgataaagtgtcaagcatgacaaagttgcagccgaatacagtgatccgtgccgccctggacctgttgaacgaggtcggcgtagacggtctgacgacacgcaaactggcggaacggttgggggttcagcagccggcgctttactggcacttcaggaacaagcgggcgctgctcgacgcactggccgaagccatgctggcggagaatcatacgcattcggtgccgagagccgacgacgactggcgctcatttctgatcgggaatgcccgcagcttcaggcaggcgctgctcgcctaccgcgatggcgcgcgcatccatgccggcacgcgaccgggcgcaccgcagatggaaacggccgacgcgcagcttcgcttcctctgcgaggcgggtttttcggccggggacgccgtcaatgcgctgatgacaatcagctacttcactgttggggccgtgcttgaggagcaggccggcgacagcgatgccggcgagcgcggcggcaccgttgaacaggctccgctctcgccgctgttgcgggccgcgatagacgccttcgacgaagccggtccggacgcagcgttcgagcagggactcgcggtgattgtcgatggattggcgaaaaggaggctcgttgtcaggaacgttgaaggaccgagaaagggtgacgattga

SEQ ID NO: 115 - DNA, 1275 bp, artificial
  Centroid sequence
atgtccaccaacttatcagtgataaagaatccgcgcgttcaatcggaccagcggaggctggtccggaggccagacgtgaaacccaacagacccctgatcgtaattctgagcactgtcgcgctcgacgctgtcggcatcggcctgattatgccggtgctgccgggcctcctgcgcgatctggttcactcgaacgacgtcaccgcccactatggcattctgctggcgctgtatgcgttgatgcaatttgcctgcgcacctgtgctgggcgcgctgtcggatcgtttcgggcggcggccggtcttgctcgtctcgctggccggcgctgctgtcgactacgccatcatggcgacggcgcctttcctttgggttctctatatcgggcggatcgtggccggcatcaccggggcgactggggcggtagccggcgcttatattgccgatatcactgatggcgatgagcgcgcgcggcacttcggcttcatgagcgcctgtttcgggttcgggatggtcgcgggacctgtgctcggtgggctgatgggcggtttctccccccacgctccgttcttcgccgcggcagccttgaacggcctcaatttcctgacgggctgtttccttttgccggagtcgcacaaaggcgaacgccggccgttacgccgggaggctctcaacccgctcgcttcgttccggtgggcccggggcatgaccgtcgtcgccgccctgatggcggtcttcttcatcatgcaacttgtcggacaggtgccggccgcgctttgggtcattttcggcgaggatcgctttcactgggacgcgaccacgatcggcatttcgcttgccgcatttggcattctgcattcactcgcccaggcaatgatcaccggccctgtagccgcccggctcggcgaaaggcgggcactcatgctcggaatgattgccgacggcacaggctacatcctgcttgccttcgcgacacggggatggatggcgttcccgatcatggtcctgcttgcttcgggtggcatcggaatgccggcgctgcaagcaatgttgtccaggcaggtggatgaggaacgtcaggggcagctgcaaggctcactggcggcgctcaccagcctgacctcgatcgtcggacccctcctcttcacggcgatctatgcggcttctataacaacgtggaacgggtgggcatggattgcaggcgctgccctctacttgctctgcctgccggcgctgcgtcgcgggctttggagaaattcttcaaattcccgttgcacatag

SEQ ID NO: 116 - DNA, 750 bp, artificial
  Centroid sequence
gtggcaatgaccacaccaaatccactggcaaaaacgaaaggtgcgggaacgacgttctggatgtacaccggcaagggcgatgcgtttgcgaaccctttatcggacactgactggctgcgtcttgcgatggtgaaggatctgcaacctggcgaaatgaccgctgatgcagaagatgacacttatctcgatgatgaagatgcagactggaaaacgacaacccaggggcagaaatccgtcggtgatacttcggcgacgctggcctggcgtccgggtgacagcgggcagaaaaaactggttcagttgttcgactccggtgaagtctgcgcgtttcgtatcaaatatcccaacggcactgttgatgttttccgtggctggctgagctcactgggtaaaaccattgcctcaaaagacgtgatgacccgcacagtgaaaatcagcggtgtggggcgtccgtatctggcagaggaaggcactgaaacagtgagcgttaccgggctgacggtggcaccggcatctgccagtgtaaaagtgggagcaaccaccacgctgacctttacagtaaaacctgacggagccagtgacaaagcgatcagtgtgcattcgacagatccacagactgccacggtgaccctgaacgggcttgtggccacggtgaaaggcgtgaagcagggcagtgtcagcattgtgggcatgacttctgacggcgattttgtggcagtggctgcggtggctgtcagcgccgcaggttaa

SEQ ID NO: 117 - DNA, 435 bp, artificial
  Centroid sequence
atgttaagtattattttgacagggcatggcggatttgccagcggcatggaaaaagcaatgaagcaaattctcggcgagcagtcgcagtttatcgcgatcgatttcccggaaacctcaagtaccgcattactgacttcgcagcttgaagaagccatcgcccaactggattgtgaagacggcattgtttttctgacggatttgttgggcggcacaccgtttcgcgcggcttcaacgctggcaatgcaaaaaccgggctgtgaagtgatcaccggcaccaatttacaactgttactcgaaatggtgctggaacgcgaaggattaagcggtgaagaattccgtgtacaagcgctggagtgcggacaccgtgggctgaccagtctggtggacgagttaggtcgctgccatgaagaatgcccggtcgaggaaggaatatga

SEQ ID NO: 118 - DNA, 1671 bp, artificial
  Centroid sequence
ttgcaatttgactacatcattattggtgccggctcagccggcaacgttctcgctacccgtctgactgaagatccgaacacaaccgtgctgctgcttgaagcaggcggcccggactatcgctttgacttccgcacccagatgcccgccgcgctggcgttcccgctacagggcaaacgctataactgggcctatgagacggaacccgaaccgtttatgaacaaccgccgcatggagtgcggacgcggcaaaggtctgggcggttcatcgctgatcaacggtatgtgctacatccgtggcaatgcgctggatctcgataactgggcacaagaacctggtctggagaactggagttatctcgactgcctgccctactaccgcaaggccgagactcgcgatgtgggcgagaacgattaccacggtggcgatggcccggtgagcgtcaccacctccaaacccggcgtcaatccgctgtttgaagcgatgattgaagcgggcatgcaggcaggctacccgcgcacggacgatctcaacggctatcagcaggaaggttttggcccgatggatcgcaccgtcacgccgcatggccgtcgcgccagcaccgcgcgtggctatctcgatcaggccaaatcgcgccctaacctgaccattcgtactcacgccatgaccgatcacatcatttttgacggcaaacgcgcggtgggcgtcgagtggctggaaggcgacagcaccattccgacccgcgcggcggcgaataaagaagtgctgttatgtgcaggcgcgattgcttcaccgcagatcctgcaacgctccggcgtcggcaacgctgaactgctggcggagtttgatattccgctggtgcatgaattacccggcgtcggcgaaaatcttcaggatcacctggagatgtatctgcaatacgagtgcaaagaaccggtttccctctaccctgctctgcagtggtggaatcagccgagaatcggtgcggagtggctgtttggcggcaccggcgttggtgccagcaaccactttgaagcaggcggatttattcgcagccgtgaggaatttgcgtggccgaatattcagtaccatttcctgccagtggcgattaactataacggctcgaacgcagtgaaagagcacggcttccaatgccatgtcggatcgatgcgctcgccaagccgtgggcatgtgcggattaaatcccgcgacccgcaccagcatccgggaattctgtttaactacatgtcgcacgagcaggactggcaggagttccgcgacgcaattcgcatcacccgcgagatcatgcatcaacccgcgctggatcaataccgtggccgcgaaatcagccctggtgtcgaatgccagacggatgagcagctcgatgagttcgtgcgtaaccacgccgaaaccgcgtttcatccgtgcggtacctgcaaaatgggttatgacgagatggctgtggttgacggcgaaggccgcgtacacgggctggaaggcctgcgcgtggtggatgcgtcaattatgccgcaaattatcaccggcaatttgaacgccacgacgattatgattggcgagaaaatagcggatatgattcgtgggaaggaagcgttgccgaggagcacggcgggatattttgtggcaaatgggatgccggtgagagcgaaaaaatga

SEQ ID NO: 119 - DNA, 402 bp, artificial
  Centroid sequence
atggaaatcagcctgttgcaggcatttgcgttgggcattatcgcctttatcgctggcctggatatgtttaacggcctaacccatatgcaccgcccggtggtcctcggcccgttggtcgggctggtacttggcgatctgcataccggaattttaaccggcggtacgctggaactggtgtggatggggctggccccgctggcgggcgcacagccgcctaacgtgattatcggtactatcgtcggcacggcgtttgccattactactggcgtgaaacccgatgtcgcagtaggtgtcgccgtacctttcgctgtcgcagtacagatggggattaccttcctgttctcggtgatgtccggcgtgatgtctcgctgcgacctggcaacaaacccgcgccgcatttga

SEQ ID NO: 120 - DNA, 510 bp, artificial
  Centroid sequence
gtgaaggccaataagcaaaacaaagaggaacatgctatgccaaatattgttttaagccggattgatgaacgcttgattcacggtcaggtcggcgttcagtgggtcggatttgcgggggcaaatctggtgctggtagccaacgatgaggttgccgaagatccggtacaacaaaacctgatggaaatggtactggcagaagggatcgccgtacgtttctggacgctgcaaaaagttatcgacaacattcatcgcgccgccgatcgacagaaaatcctgctggtttgtaaaacacccgccgatttcctgacgctggtgaaaggtggcgttccggtgaatcgcattaacgttggcaatatgcactacgccaatggcaaacaacaaatcgccaaaacggtttctgtggatgcgggcgatatcgcagcatttaacgacctgaaagccgctggggtggaatgcttcgttcagggcgtcccgacagagcctgctgtggacctctttaaattactttga

SEQ ID NO: 121 - DNA, 924 bp, artificial
  Centroid sequence
atgagaaagacgggtaaccgccgcgatcgtggggcaaaaaccaccatcgtccggcggcagatcaaaaagaatcatgccgggcaccacggcggggcgtggaaggtggcgttcgccgactttactttggcaatgatggcgctgtttatgacgctgtggattgtcaacagcgtcagtaaatccgagcgtgaaagcattatcgccgcgctgcacgggcagtcgattttcagtggcggcggattgtcgccgttaaataaaatcagcccgtctcatccgccaaaacctgccaccgtggcggtgccggaagagacggagaaaaaagcgcgagacgtcaacgagaaaacagcgctgctgaagaagaaatccgccaccgagcttggcgagctggcaaccagtatcaacaccattgcccgtgatgcgcatatggaagcgaatctggagatggagattgttccccagggattgcgcgtgctgattaaagatgaccagaaccgcaatatgtttgaacgcggcagcgcgaagattatgccgttctttaaaacgctgctggtggagctcgcgccagtgttcgactcgctcgataataaaattattattaccgggcataccgatgcgatggcctacaaaaacaatatctacaacaactggaacctttcgggtgaccgcgcgctttcggctcgtcgggtgctggaagaggccggaatgccggaagataaagtgatgcaggtaagcgcaatggcggaccagatgctgctggacgcgaagaatccgcaaagtgcgggtaatcggcgcatcgagattatggtgctgaccaaaagtgcgtccgatacgctgtatcaatactttggtcagcatggggataaagtggtgcagccgctggtgcaaaagctggataagcagcaggtgctttcgcagcgaacgcgctaa

SEQ ID NO: 122 - DNA, 549 bp, artificial
  Centroid sequence
atggcaaaacttaccttacaaaagcagttgctcaaagcgggactagtcaccagcaaaaaagcggcgaaggtcgagagaacggcaaaaaaatcgcgtgttcaggcgcgtgaagctcgggcggcggtagaagaaaataaaaaggcacagcttgagcgtgataaacagcttagcgagcaacaaaaacaagcggcgttggcgaaagaatataaagcccaggtgaagcagctcattgaaatgaaccgaattaccattgccaatggcgatattggttttaacttcactgacggcaatctgattaagaagatttttgttgataagctcacgcaaacgcagttgattaatggtcgtctggcgattgctcgcttgttggtcgataacaatagcgaaggtgaatacgccattattcccgccagcgttgccgataaaattgctcagcgtgatgccagcagtattgtgttgcacagcgcgcacagcgcgctcagcgccgaagagcagaatgaagatgatccgtatgccgacttcaaagtgcctgatgatttgatgtggtaa

SEQ ID NO: 123 - DNA, 1281 bp, artificial
  Centroid sequence
gtgaaacatctgacagaaatggtgagacagcacaaagcgggcaaaacaaaggggatttatgccgtttgttccgcgcatccgctggtgctggaagcagcaatccgctacgcctgcgcaaaccacacgccgctactgattgaagcgacctccaaccaggtggaccagttcggcggttataccggaatgacgcccgccgattttcacggcttcgtttgccaactcgccgactcgctgcatttcccacaggacgcgttgattttgggtggcgatcatcttggccctaaccgctggcaaaacttgcctgccgctcaggccatggctaatgccgatgatttgattaaaagctacgtcgcggcgggattcaaaaaaatccatctcgattgcagtatgtcttgtcaggacgatccggttcccttaaccgatgacatcgtggctgagcgcgctgcccgtctggcgaaagtggcggaagaaacctgtcgtgaacactttggcgaagccgatctggtgtatgtcattggtactgaagttccggtgcccggcggcgcgcatgaaaccttaaacgaactggcggtcaccacaccggatgcctcccgcgccacgctggaagcccatcgtcacgcctttgaaaagcaggggctgaacgccatctggccgcgcattattgcgctggtcgtgcagcctggcgtcgaattcgatcacaccaatgttattgattaccagccagcaaaagcgaccgccttaagccagatggtcgaaaactatgaaacgctgattttcgaagctcactccaccgattatcaaacgccgcagtcactgcgccagttggtgattgaccactttgccattctgaaagttggcccggcgctgactttcgccctgcgtgaggctctgttttctctggcggcgattgaagaagaactggtgtcggcaaaagcctgttccggtctacgccaggtactggaaaacgtgatgctcgaccgcccggaatactggcaaagccactaccacggagacggcaacgcgcgtcgtctggcacgcggttacagctactcggatcgcgtacgctactactggccagacagccagattgatgacgctttcgctcatctggtccgcaatctggcggatgcgcctattccgctgccgctcatcagccagtatctgccgctgcaatacgtgaaggttcgatccggcgagctacagccaacgccacgggaactcattatcaaccatattcaggacatcctggcgcagtaccacgccgcctgtgcaggccaataa

SEQ ID NO: 124 - DNA, 498 bp, artificial
  Centroid sequence
atgctcatgaaatggtgcaaacgtgggtatgtattggcggcaatattggcgctcgcaagtgcgacgatacaggcagccgatgtcaccatcacggtgaacggtaaggtcgtcgccaaaccgtgcacagtttccaccaccaatgccacggttgatctcggcgatctttattctttcagtctgatgtctgccggggcggcatcggcctggcatgatgttgcgcttgagttgactaattgtccggtgggaacgtcgagggtcactgccagcttcagcggggcagccgacagtaccggatattataaaaaccaggggaccgcgcaaaacatccagttagagctacaggatgacagtggcaacacattgaatactggcgcaaccaaaacagttcaggtggatgattcctcacaatcagcgcacttcccgttacaggtcagagcattaacggtaaatggcggaaccactcaggcagtgattagcatcacctatacctacagctga

SEQ ID NO: 125 - DNA, 432 bp, artificial
  Centroid sequence
atgtttctgaaaacagaacaatttgaatataacggtgtgtctgtcacgctttccgaattgtctgcgctgcagcgtatcgagcatcttgccctcctgaaacggcgtgcagaacaggcagaatcctgcggcaacctgcaggtaagcgtggaagatctcgtcagaaccggcgcgtttctggtggcgatgtccctgtggcataaccatccacagaaaacgcagtcaccgtcaatgaatgaggccgtgatgaagatagagcaggaagtgctcaccacctggcctgccgatgccattgcccgggcggaagacgtggtgttgtgcctgtccgggatgatcgaagctgttcgtccggatactgatattactgaagtggcgaaaaataacacgctgactgatgatgatttttctgcgggaaagtcttcgacggcgagctga

SEQ ID NO: 126 - DNA, 1362 bp, artificial
  Centroid sequence
atgaccacaccctcaaatttagacatctaccaactgatcgacacgcaaaacggtcgcgtaaccccacgaatttataccgaccctgaaatttaccaactggagctggaacgcatcttcggacgctgctggttatttctcgcccacgaaagccaaatccccaaacccggtgatttttttaacacctacatgggcgaggatgcagttgtggtggttcgccagaaagacggcagcatcaaagcgtttctcaaccagtgtcgccaccgcgcaatgcgcgtcagctacgccgactgcggtaatacccgcgccttcacctgcccgtatcacggctggtcgtacggcattaacggcgagctgatcgacgtgccgctggaaccgcgcgcctacccgcaagggctgtgcaaatcgcactgggggctgaacgaagttcctggcgtagagagctacaagggactgattttcggcaactgggatacctccgcgcctgcgctgcgcgattatctcggcgacatcgcctggtatctcgacggtgtgctggatcgtcgtgaaggcggcaccgaaatcgtcggtggcgtacaaaagtggaccattgattgtaactggaaattccccgccgaacagtttgccagcgaccagtatcacgcgctgttcagccatgcctcggccgtgcaggtgctgggggcaaaagacgacggtagcgataaacgcctgggcgacggacaaaccgcccgcccggtgtgggaaaccgccaaagacgcgctacagttcggtcaggatgggcacggtagcggatttttctttaccgaaaatcctgatgccaacgtctgggtcgacggcgaagtctccagctattaccgcgacacctacgtggaagccgagcagcgtctgggtaaagttcgcgccctgcgtctggccggtcacaacaacattttcccaacgctttcctggctcaacggcactgccaccttaagggtctggcatccgcgcgggccggatcaagttgaagtatgggcattctgtattaccgataaagccgcctctgatgaagtgaaagccgcgtttgaaaacagcgcaacgcgggcttttggccccgccggattcctggagcaggacgactcggaaaactggtgtgaaattcaaaaactgctgaagggtcatcgcgcacgcaacaccaaattgtgtctggaaatggggctgggccaggagaaacgtcgtgaagacggcattccggggatcaccaactacatcttttcggaaaccgccgcgcgcggcatgtatcagcgctgggccgatttactcagcagcgaaagctggcaggaagtgcaggaaaaaaccgccgcttaccagcaggaggtgatgaaatga

SEQ ID NO: 127 - DNA, 774 bp, artificial
  Centroid sequence
atgcacgacttcaccgacacccactgccacttcgatttcccgccgttcagcggtcaagaacgcgaaagcctggagttggcggagcaagcgggcgtgcgacggattatcgtacctacggtgaccgccgatcgttttgtgcgggtattgaagctggcacgcgattatccaccgctgtttgccgccctggggctacacccgctgtatattgccgagcaccatgagccggagctggaacaattggcggggttcctggccagccgaccgccgaagctggtggcggtaggggagattggcctcgatctgtatatggaaaacccgcagttcgagcgccagcagcaggtgttaaccgcgcaattgaagctggcaaagcaacatgatttgccagtgatcctgcattcgcgccgcagccacgatcagttggcggcgatgctgcgtcgcaccgaagtacctcgtcgcggcgtggtgcacggctttgctggcagtctgtcgcaggcgcaggcgtttatccgcctgggatattacattggcgtaggaggcaccatcagctatgagcgggcgcagaaaacccgcaatgtcatggcccaactgccgttgacgtcgctgctgttggaaaccgatgcgcccgacatgccgctggccggttaccaggggcaaccgaaccgccccgagcgcgctgctgaagtgttcgctgctctgtgccaattgcgcccagagtcggaggagatgatcggcgcccaattacagcaaaatacacgagagttattttcagtgtga

SEQ ID NO: 128 - DNA, 621 bp, artificial
  Centroid sequence
atgctgaccatctggggccgtgaaaattcgaacaacgtcagaaaagtactctggtgcgccgcagaactggagttgagttatcgccatatcaatgccggcggtgcctatggcaaggtggacgaggccgcctatcgggcgctgaacccaaacggcctggtgccgctattgcaggacgatgactttgtactgtgggaatccaacaccatcgtacgctacctggcggccaaatacggccaggcgccgttctacccgcaggatctgcagcagcgcgccgcggccgaaaaatggatggattgggcgaccgcaaccatcgtcaccccgtttcgcccggtgttctggggcatggtgcgcaccccacccgaccagcgcgatatgctgaaaatcgaagcggccatcgccgaggtggaaaagtgcctcgatatcgttgaacacaccctttcccagcaggcgtacctgtccggcgaccagctcggcatcggcgacattccgctcggcagctttatctatgcctggtttgaaatgccgatcgcccgccgcccacgtccgcatatggaacgctggtatcagcaattgtgcgcccgaccggcttaccgcagcggcgtgatgtccgccatgacctga

SEQ ID NO: 129 - DNA, 600 bp, artificial
  Centroid sequence
atggcgaaactattggtgctttactactcgatgtacgggcatattgaaacgctggcacaggcggttgccgagggagccggcaaagtcagcggcattgaggttagcgtgaaacgggtagcggaaaccatgccggccgaggcctttgccaacgccggcggcaaaaccgatcagccggcgccggttgccagcccgcaagagctggcagagtacgatgcgatcatcatcggcacgccaacccgctttggcaatatgtccggccagatgcgcaccttcttcgatcagaccggcgggctgtgggcgtccggtgcactgcacggcaaaattgccagcgtattttcctccaccggcaccggcggcggtcaggagcacaccatttcgtcgacctggaccacgctggcgcaccacggcatgatcatcgtacctatcggttacaaaacgccggagctgtttgacgtttcaaaaacccgtggcggcacgccctatggcgccaccaccattgccggtgccgatggctcgcgccagcccagccaagaagaactcaacatcgcgcgctatcagggtgaatacgtcgccagtctgaccgccaagctgaaaagctga

SEQ ID NO: 130 - DNA, 750 bp, artificial
  Centroid sequence
atgtcaatcaatgctgatctccaactgctgcggccggggagcaaggtctatttgttccatgttgacggcagcatgttcgacggtccggagttgtttttccataactatccgatcccttacaccgaagatgaactgatcgccggcggcggcgatcctgatcaactacctgcgaaatcgatttggtggcaggggcaagaatacaaaccgtggccagttgaggctacggggtttgaagtgaccaatgatggcagtgcaccaacgccaacattgcgtgtggccaacctggacggaaccatttctgctatgtgtctggcatatcagaacatggcccaggccaaggtgactcgacattttaccttcactcaatatcttgacgttcgtaatttccctaatgggaatgcagaggctgatccgacaaaggaaaagctggatgtattctatatcgagaacaagaccagcgaagataatgaagttattgagttccagctttcttcaccggcagacctgcagggtattcaaatccccacgcgccaaatccatagcctgtgcacctggtgtatccgtgggcagtacagaggcccatcctgcggctataccggcacaaactattttgatcaggacggcaacccggtagacgacccgtcgaaggatgactgcggcggcctgctcagtgattgcaaaaaacgttggggcgcgacagagcaactgccgttcggtggtttcccaggctcggcattgctgaagaggtaa

SEQ ID NO: 131 - DNA, 622 bp, artificial
  Centroid sequence
aaaattcgagggaactttataaatcgacggtcataaaacgcctaagtgacgcttttgaaggacgtccagtggctgatattacggtcaagcagtgggtcgatttgttcactcaagaagaaaggaagaacagcaggagagctaggcaacttcttgttcaattgcgatctgccatgggttggtgcattcgccgacattttatccctgattgcgcagcgatgagggttgagcctcgcgacgtagggagccgttcagaaaccggggatagaactctcacttactacgaacttgcagacatatgggttgcgatagagcgaagccgtgcctcaacgtcaaataaactattacaccagatgctaatgctgtggggggcgcggctgtcagaactgagactatccgagcgtcacgagttcgatatgagagaaatggtctggacagtaccaaaagagcatagcaaaactggaagggaaatcagacgcccgatctttgctcatattgaacctttgttggaaaaagcgatgctaacttatgataaggttctttttcctggaaatttaatcactgagcctttaacgatcgccgctgcaaacaggtacataaaacgtattagagaagggctggagct

SEQ ID NO: 132 - DNA, 468 bp, artificial
  Centroid sequence
atggcaggacgacgcccgaaaccgacccatttaaaagtggtgaccggtaatccgggcaaacgcaaacttaatgataaagagccgacgccagcccgcgaaattcccagccctccggcacatctcaccgattgggggaaaacagcctgggggcgaatgaccgtcttgctcgacggcatgggtattttgactgtcgcagatacgtttgcgctcgaacgcctttgcgacatttacgccgatattctccagcttcgaaacacgatcaccgatgagggccgcacgtacacggttcaaactgagggcggatttctgatcaaggctaaccctgcagtatcaatgctggcggatgccgatcgtcgctttaaaagctatttggtggaatttggtctgacgccagccgccaggtcaaaggtaaatgtaaatggtggaaaaaaagaaacggacccgctcgacgaattcttcggcacctga

SEQ ID NO: 133 - DNA, 654 bp, artificial
  Centroid sequence
atgaaaaacgttggcgttgtgctgagcggctgcggagtttatgacggtgcggagatccatgaagccgtcctgacgctgcttgcgttggaccgggcgggggcgcaggcggtgtgctttgcgccggataaatctcaacttcatgttattaatcacttaactggcgatgagatgccgggagagcgcaatgttttggtcgagtctgcgcgtattgccagagggaaaattcggccgctttcacaggccgatgccggccagttggatgcgttgattgtacccggtggatttggtgcggcgaagaacctcagcagcttcgccagtgaaggggcagaatgctggattgataaagatttagctaagttaacgcaacaaatgcataaggcaaataaaccaattggttttatgtgcattgcccccgcgctgctgccgaagttgctggatcaacaagtgcggctgaccattggcaacgatccggacctgggtgaagtgattgatgccatgggcggcgagccggttatttgcccggttgatgacatcgtggtggatattgaaaacaaagtggtgaccacgccagcctatatgttggcgaaatctatcggcgaggcggccgacgggattgataagctggtttcacgggtgctggatttggttgaatga

SEQ ID NO: 134 - DNA, 660 bp, artificial
  Centroid sequence
ttgttagtggaagacgatctgcaattgggcaaggccctgtgccgggcactagaactggcgggttttgagctatgctgggtgcggctggtgcatgatgctcaaaccaggctctcacagggcagtttcgatttaatgctgttagacctgaccctgccagacggggatggattaaaaaaactggtcgagtggcgagccgccggacaaaatatcccgatcattattctgaccgcacgcgaccgtatcgaaagcctggtcaatagcctggactccggcgcggacgactttctggccaaacctttcgccttgcctgagttgatatcccgcgtgaaggcggtgaaccgccgcatggccgggtttgcctcccaaacctggagcctgggcaatctgtatctggacccaattaatcaccaggtgacgctggatgacgaacttctgctgttatcgaaaaaggagtatcggctgctgcatgaactgatgcgctgcgccggcaccgtggtgcgtaaaaccgcactggagcagagtctgttcggccatggcgacagcgtggaaagtaattctctggaggtgcatatgcataacttgcggcgcaagattggcaaggaaaaaattatcaccgtgcgtggcatcggttatttattaaaaaaagagactctgggatga

SEQ ID NO: 135 - DNA, 390 bp, artificial
  Centroid sequence
atgttggcattacgtcaggtgcatcacatcgcagtgattggttcagactatgcggccagtaagcatttctactgcgacatcctcggttttaccctattgggcgagttttatcgtgaagaacgagattcatggaaggcggatctggcgctcaatggacaatacagtatcgaactgttctcctttccgtcaccaccggcccgcgtcagccgtccagaagcatgtggcctgcgccacctggcgttcagtgtcgacgacatcgaacaggcgatcgcgcatctggaagctgccgggatcctgtgcgaaccggtacgcgtcgatccttatacccagtctcgttttacttttttcagcgatcctgatggattgccactggaactgtatgaacaatga

SEQ ID NO: 136 - DNA, 579 bp, artificial
  Centroid sequence
atgaaaaagccaactaagcccaagcagtacaaggataaggtctgcgctcagtgtgaaacgacattcacgccagagaagtacctacagaaagtctgcggccctctctgcgctatggcataccagcgtgacgcacgtaagcgccttgctgaaagggaacgcaaagccaagttgaagattcggaagctggccgttaagccgctgcagtatttcatcaaccaggcacaaaccgaatttaacgcctacatccgtgaacgtgacgccgaccagccttgcatcagttgtggccgctaccacgaaggccaatatcacgccgggcattatcgcaccgtgggtagcaatcgagagctgcgttttgatgaagataattgccataagcagtgctcggtctgtaacaacttcaaatccgcgaacctgagtgaataccggcctaacctgatcgccaagataggtcaggcgagatttgaccggctgataggccccccgccgaaggcagataagttaacccgcagtgactacgaacgtatccgcgacacatataaagccaagcgcaaagcattgaagcaggagaaggccgcatga

SEQ ID NO: 137 - DNA, 861 bp, artificial
  Centroid sequence
gtgaatttaccgcatctggcgcagcggctgtttaacacgccgctggcgctgcacccgcataaagctgaagtcgtcatggctgccatgatggaacggttcgggataacccgcatcaataccctggcctctgattggttgggagaagacgacagttttagccgtaaagcacgcaagcaggatgcgggttatgacgtggttggtggtattgccgttatacccgttcaggggacgttggttcagaaactgggctcattgcgcccctacagcggcatgaccgggtacgacggaattcgccaatcattccttacggcaatgaatgatccggaggtggccggtatctgtctggatatcgattctccagggggagaggttgcagggtgttttgaccttgttgacgagatttatcacactcacggctctaaaccaatccactccattctgaccgaaaatgcctattctgccgcatacgccattgccagtgccgcagatcgcattcacgttccgcgcactggcggtgtcggatcaattggtgtcatcgttattcactgtgactggtcacagcgaattaaggaagacggccttgcagtgtccatcattacttatggcaaccgcaaggctgaaagcaatccttacgtcaaactgtccgatcaggcacgtgccgcgatccaggatgatgtggatacgatgggtaggctttttgtcagcactgtagcccgaaatcgggggatctctgaaaaaactatccgtaatacccaggctgcctgtttcctggcggctgatggcgtacaactggggctggctgacgcagtcatgacccctgacgccgcattccgaaaattattcaccgaagcaggagtttaa

SEQ ID NO: 138 - DNA, 1089 bp, artificial
  Centroid sequence
atgagcattgagattaaacaaattaacaaagcgtttggccgtaccccggtgctgaacgatatctctctggatattccttccggccagatggtggcgctgctggggccgtccggttccggtaaaaccacgctgctgcgaattatcgccgggcttgaacatcagaacagtgggcagattcagttccacggcaaagatgtcagtcgcttgcatgcccgcgatcgtcaggttggatttgtgttccagcattacgcgctgttccgccatatgacggtgtttgacaacatcgcctttggcctgacggtgctgccacgtcgtgagcgtccttccagcgttgaaatcaaacaacgtgtaacccgtttgctggaaatggtgcaactggcgcatcttgccaaccgcttcccggcgcagctgtcaggcggccagaagcagcgtgtggcgctggcgcgtgcgctggcagtggaaccacagattttgctgctggatgaacccttcggtgcgctggatgcgcaggtgcgtaaagagctgcgccgctggctgcgtcagttgcatgaagagttaaaattcaccagcgtattcgtcacccatgaccaggaagaggcgatggaagtcgctgaccgcgtggtggtgatgagccagggcaatatcgaacaggtgggcacgccagatgaagtatggcgcgacccggccacccgctttgtgctggagttcctcggtgaagtgaaccgctttgacggtgaagtccacggatcgcagttccatgtcgctgcgcatcgctggccgctgggttatacccctgcccaccagggcaaggtcgagttgttcctgcgcccgtgggagattgatgtctcgcgccagagcagcctggaaagcccgttgccggtgcaggtgctggaagtcagcccgcgtggccacttctggcagttggtggtgcagccaactggctggcaaagcgaacccttcaccctggtgtttgatggtgagcaaaccgcgccgattcgtggcgaacgtctgtttgttggcctgcaacaggcacgactttaccaggggacgacaccgctgcgcgcggttgcctttgccgagagcgcctga

SEQ ID NO: 139 - DNA, 203 bp, artificial
  Centroid sequence
ctatcatgatcgaggcggtaggtaatgaatacgcccgcatgcgcacccgtctcattgcgattgctcctgaacatggcccccggttgcgggtgctggcttccaccactaacgacgcggagtttgtccaggcactgcaagaggtggtgtatgaggcgctggaggaattaagcattgatgcagataaccctaggagagaggtctga

SEQ ID NO: 140 - DNA, 642 bp, artificial
  Centroid sequence
atgctaacggccaggatccgttactcgagccaagccatgccctcattgttattagttgatgaccacccggtggttcatgtcgcactggaagcggcgctaatcaagtcttcccgctcctatgttctacaggcggtagaggatgacgtacaggcgctggcccagttggccgcagccgactttgcactggtgatcctcgatatcggcctgccgcaggtagacggcctgcagctgctgaaaaagattcgccgccattacccgcagcagtcgatcctgatttataccgcccaggaagaagagatttatgcccgtatggcctatgcggccggtgccaacggctttgttcacaagggcagccgactggaacaactggtgctggcgattgaaaccgtgctggccggggaactgagctttcccgccgccgcgatggcagaagaaacccagccgacagaaggctcgctgctgacgccaaaagaactgcagattctcgggctgctcagtaaagggttgtccaacctgcaaattgccgagatgctgagcatcagcaacaaaaccgtcagcacccacaagaagaatattttgcgcaagactggcgccagtaacctgctggagctggtggcggtgtttaaagagctgacgccatga

SEQ ID NO: 141 - DNA, 597 bp, artificial
  Centroid sequence
atgcctgtgtatcaaattgacggtttgacgccggtagtcgatcccagcagttatgttcaccctacggcggtgctgattggcgacgtgatggtcggcaaaaacgtctacattggccccaatgccagcctgcgcggcgattttggccgtatcgtggtgcacgacggtgccaatattcaggacaactgcgtaatgcacggttttccgcaacaggatacggtggtggaacaggacggtcatatcggtcatggcgccatcctgcatggctgtcgcgtcgggcgcaacgcgatggtcggcatgaatgcggtggtgatggacggcgcgatagtgggtgaaaacaccatcgtcggcgcctgttcctttatcaaggcggctgcggacatcgccgccaataaactggtgttgggcagcccggcgcgcgttgtgcgcgagttgaccgagcaagaactgagctggaaacgcaccggtacgctggaatatcaggatctggtcgtccgctgcaagcagtcgctgagagaagtcgccccgctcagtgccgcagaaccggaccgtcagcgcctgacctttggcgatcgcctggtgccaaagagccagctgtaa

SEQ ID NO: 142 - DNA, 921 bp, artificial
  Centroid sequence
atgactaagttacgcgttggtgtggtagggctgggtggtatcgcgcaaaaagcctacttgcccatcctttcacaggcagcggattggacgttggtcggcggtttttcccctaatcagcaaaaagcgcagccgatatgcgacagttatcgcatggcctgcttttccggcctggatagcctggcgcagcagtgtgacgcggtatttgttcacagcagcacagccagccattttcaggtgataagcgaactgctgcgccatggcgtgcatgtttatgtcgataaaccgctggcggagaccgtggagcagggcgaacggctgatcgcactggctgagaagcagggcaaaacgttgatggtgggttttaaccgccgtttctcccccttgtatcttcagttgaaacaggaaatgcaacggccggcgtcgattcgcatggataagcaccgggccgacagcgtagggccaaacggcctgcgctttaccctgttggatgattatttgcacgtggtcgataccgcgctgtggctggggggaagtgcggggcacctactcagcggccacctgcgcgccacagacgccggtgaactgctgtacgccgaacaccattttgcctgcggcgaaacgctggtgacgaccagtatgcatcgtcgggccggcagccagcgtgaaagcgtgcaggcggtggccgagggggcggtgtatcaggtgaacgatatgcggcaatggttgcgggaagatccgcagggcgtactggagcatccggcaccgggttggcagaccacgctggcgcagcgaggtttcgatggcgctatccggcactttatcgcgtctgtcagcaaccagaccgtgccggaaacggccggggaacaggctatcgccgcgcaacgggtgatcgaacggctgctgcaggatgccggtttgtaa

SEQ ID NO: 143 - DNA, 1900 bp, artificial
  Centroid sequence
atgcacgttattgaaggccgcaaagggggcagtagcagcccgagcaccccgacagaatcacctgattctttgcagtccacctcctacgcaaaaatacttctggcgctaggtgagggcgagcttggcggttctctcgatggaacacgaattttcctcgacggcacgccaattctttccgccgatgggaacgaaaacttccccggcgttcgctgggagtttcgacctggtacgccgcatcaggattatattcccggcatgccggacgtagagaatgaaattactgtcagcaccgaactaaccagcgatagagattgggttcgctcggtgacgaatacacaactttcagcagtacggcttcgcttttcttgggcccagttgcagcagcagcaagataacggggatgtagtcgggtaccgcatcgagtatgcaattgacgttgccactgatggtggcgcttatcaagaggtgttgcgcacggctgttgatggcaaaacgacgaccaaatatgagcgcagtcaccgcatcgatctgccggtgaccacaacagggtggcaagtgcgtgtccgtcgcctgacaccaaacagcaccagtaaccgggttgccgataaaatggttgtcgaagccattacggagacgatcgacgccaagttacgttacccggaaacagcgctgctgtttatccagttcgatgcgaaacagtttcctaatatcccgcaagtttcctgtgagccaaaaggcagagttatccgcgtgccatcgaattacaacccggagacacgggaatataccggggtgtgggacgggacatttaaaacggcatggacgaacaatcccgcatggataacgtatgacctgatgataaatgatcgattctcgatcggaactcgggttaaggcggaaaatctgtcgctgacaaaatgggacttgtatcagatcgggcagtactgcgatcagttagtgcctgatggccggggcggtgatgggaaagagccacgttttctttgtgatgtttatatccagtcacaagaggatgcctggaatgtattacgtgacattgcgtccatttatcgcggctctaccttttgggcaaataacggtatgaatgcccatgctgacatgcccgcagatgttaaatacatcttcacccgtgccaacgtgaaagatggcaagtttacctatgccagcgccagcgagaaaacgcattacagcacctgtatggtgagctggagcgacccggcaaacggttatcaagatgcgatagagccagtagcagaacaatcactgatccgccgctatggcatcaaacaggccgatctgaccgctattggatgtattcgaaagtctgaaggtatccgccgtgggaaatggttgcttcataccaacgacaaagatcgtctggtgtcatttaccgtggggcttgatggtaaagtgccgctccctggttggattatcgcagttgcggatgaaatgcttgcagggcgctcactcggtggtcgtatcagctccgtagatggtcgcaatatcatgcttgaccgcgtcgcctcagcagctgttggcgaacgtttgattttgaacctgccgagcgggaaagcggaggggcgaacgattgcggcggtatcgggtaaaaccgtaactgttaccactgcgtattctgagacgccagttgccgaggctgtgtgggcggttgatgcttctgacttggcgctgcagcagtaccgcgtaacaggtattaaagaaagcgatgatggagcatcgttcgatattaccgccgtagaacatgacccgaataaatacgcgaaaattgatactggagcacgtatcgaagacccaccaatcagtgttattccgccgggcgtgcaaccgccgccaaagaatgttgctattagcagtttttttcggt

SEQ ID NO: 144 - DNA, 345 bp, artificial
  Centroid sequence
gtggcgctggtcggaatcggcgatatgaacgaaaacagctatatggtcaagctggggtggtttacgccacacgaaattatcgacgccagcctgaaccagggcgtgatcggcgatattgtcggttatgatttcttcaatgcgcaggggcagcacgttgacacggtaatgaacgatcgggtgattggcctgagcatcgacgaactgcgtaaaatcccctgtatgattgccattgctgccgaaaataccaaagcgttggcaatgctcggcgcactgcgcaccggcgcaattgatatcattgccaccagcgcgctcaacgtccgcaccatcctgaacatgtcgcaataa

SEQ ID NO: 145 - DNA, 705 bp, artificial
  Centroid sequence
atgatgcgtaaacagataatcagcgccgttctggcgcatgctcaggctgagtatccgcgagagtgttgtggactggtggtgcaaaatggccgccggcagcgctatgtaccgtgccgcaatctgtctccagagccaacggaacaattcagtttgtcgccggaggattacgctgctgctgaagatgccggcacaattgttgcgattgtccacagccaccctgatgcaacaacccaacccagccaactcgatatcgcacagtgtgacctgtcacagttgccgtggatcattgccagttggccggaaggtgatatcagggaattgatgcccactgtgggcatcaagccgttgcttggacgcccgttcgtgcatggattctgggactgttacgcaattgtccgggattggtatcagcttgagcgtggcatcacgctgccgaattttaaacggacagatggctggtgggatagaggggaaaacctctatatgaaactctacgccgaggctggcttcgtaccggcttcgggcgagctacaggtcggcgacgtaatcgttatgcaagttcaggctccggagccgaatcacgcaggcgtatacttgggcgatggggtaatggtgcatcacatgtatggacagctcagtacgcgcgttccttatggcgggtactggtcagaaaggacaatcaccgttttacgttacaaaggctga

SEQ ID NO: 146 - DNA, 918 bp, artificial
  Centroid sequence
ttggccggaagtagcttactgactctgattgatgacatcgcttcgttgctggacgatgtctcgctgatgaccaaaatggcggctaaaaagaccgccggggtgttgggggacgatctggcgctgaatgcgcagcaggtcaccggggtaaaagccgatcgtgaattgccggtggtatgggcggtggcgaaaggctcattgatcaacaaggcgattctggtaccgctggcgctgctgatcagtgccttcgcgccttgggcgattacgccgttgctgatggtgggtggcgcctacctgtgttacgaaggttttgaaaaggtgttccatagcctgacgcataaaaagggcgaaggggagcacagtgaaccgctgaacctgaatgaagacgtggcggcctttgaacagcgcaaggtgaaaggggcggtacgcaccgactttgtgctgtcggcggaaatcatcgccattacgctcggcaccgtagccgctgccagcttcagccagcaggtgatcgtgctgtgtggcatcgccattgtcatgaccgtcggcgtgtacggcatcgttgccggcatcgtcaagctggacgatctggggttgtacctcagccgcaagaccagctcgctggcgcaggcggttggtcgggccattgtcggtgcggcgccgtatctgatgaaaaccctgtcgatcgtcggcaccatcgccatgttcatggtcggcggcggcattttgacccatggcttgccgtcagtgcatcacctgtttgaagactgggcgtcgcatatcacggtgatgccatcattcgatcacattgtgcagggcgtggtgccttcgctgctcaacgtggcgttcggctttgttgccggcggcgtggtgctgttgctggtatcgacccttggcgcgatccgcggccgtttcaaaaactga

SEQ ID NO: 147 - DNA, 1155 bp, artificial
  Centroid sequence
atgcagagcaaaaagatttttcttgtcggcctggcgttattgctgaccgcctgtgatggcaaacccggcggagccccgatgggagcgggcggcacgccggaggtgggggttgcgacgctgcacggccaaccggtcacgctgagcagcgatttgagcggcagggtgaacgccaccatgacctcggacgttcgtccgcaggttgacggcattatcaaacagcgcctgtttaccgaaggggccgaggtaaaagccggccaggtactgtatcaaatcgatcccgccacctatcaggccagttataaccaggctgccgcacagttgaaaagtgcgcaggcgacggtgaaatccagccgtctgaaggcgcaacgctacgccgcgctggtgaaagagaatggcgtctccaaacaggatgcggacgatgcgatggcgacctatctggaggcggtcgccgctgtcgaccagtatcaggcggcgctggaaaccaccaaaatcaatctcgcttatacccaggtgcgcgcgcctatttccggccgtatcggtatttcctcggtgacgccgggtgcgctggttaccgccagccagaccgatgcgctggccactatccgcgcactggaccccatctatgtcgatctcacgcagtccagcagccaactgctcaggttccgcaaactgcaggcgtccttaaaacgtgacgatgtcacaccggtcgccatcaagcttgaagacggtacgccttatgcgcatgacggcaaactggaactgacggaagtgtcggtggatgagtctaccggctcagttacgctgcgcgccgtattccctaacccggagcatgaattgctgccgggcatgtacgttcacgccagagtcgataacggcgtcgatccgaaaggcattcttgcgccgcagcagggcatcacccgcaatgccaaaggtgaagccactgcgttggtggtgaatgcgcaaaacaaggttgagcagcgcacggtcaccaccgaacgggtgatcggcagcaactggttggtcagcaaagggctgaacgacggcgatcgtctgatcgtcgaaggcaccaataaggtggccgctggcgtcgaagtcaacgcggtcgaagtgccgaaacagacggcgaccggcacggctaacgctggggagcagtaa

SEQ ID NO: 148 - DNA, 369 bp, artificial
  Centroid sequence
atgatttattggatttttttaggcatggccattgtggctgaaatcattggtacgctgtcgatgaaatatgccagtgtaaccgacagtatcaccggtcacctggtgatgtatgtgatgatcaccacctcatatgtgctgctgtcattagccatcaagcgggtggcgctgggcgtggcctatgcgctgtgggaaggcattggcatcctgtttattaccctgttcagcgttatgtggttcgatgagccgatctctgcactgaaggtggcagggctggcgatactgattgtcggcattctgctggtaaagtcaggtacccgcaaggcgactgactcggcgaacgcgcgaggtgaccatcatgcaacagcttga

SEQ ID NO: 149 - DNA, 615 bp, artificial
  Centroid sequence
atgacggaaaattcacaactgcaggcgctgttggcggcctgtcactggattggcgacaagggctggtgtccggcgaccggtggcaatatgtcgctgcgcctggatgccgaaggctgtctggtgaccgaatcgggcaaggacaagggtagcctgagcgagcacgacctgttgcaggtgaatatcgccgacaatcatgtaccaagtggccgtacgccgtcggctgaaaccgggctgcatacgctgatttaccgtctctacccgcaggtcggcgccattttgcatacccattcggtcaatgccacggtgttgtcgcgggtggaaaaaaaccacgcattgctgctacagggttatgaaatgcaaaagtcgctcagcgggcagcgtagccatctcgacggcgtgattatcccgatcttcgataacgatcaggatattccccgtctggccgaacgggtggccgccgccgcggccacctcgccgatcccgtatggttttctggtgcgcggccacggcctgtattgctgggggcgtcaggttgcggaggcgcgccgtcatcttgaagggctggaattcctgttccagtgtgaactgcaacgacgtttgctggaggcgaaatga

SEQ ID NO: 150 - DNA, 741 bp, artificial
  Centroid sequence
atgaaaacaccagagacactgctcagccgactgcagcgcatcatgccgccgggcatcgagccaaagtttcggacggccgacgaactgctcgcctggcatcgagcggagggcgagaagcgcagcgcggagctgaacagggcgaaccagcagacacgcgcagagcgaattttcggacgctcggggatctgcgacttgcaccgcaactgcacgttcgccaactatcaggtggccaacgatgggcagcgccacgccctgagcaaggcaaaaagctatgcgcaaaatttcggtatgggtttcggctgcttcgtgttcagcggcgggtgcggtaccggcaaaaaccatttggccgcggccataggtaaccagctgctggcgaaaaatcacacggtgctggtggttaccatccccgacctgatgctgcgcgttcggcgctgctacgatggcggagagtccgaagctgcattgctcgacgacttatgcaaggtcgacttactcgttcttgacgaggtgggcgtgcagcgtgaaacgcgtggcgagtgggtgattttgaatcagattatcgagcgccggttgtcatcgttgaagccggtaggaattttaaccaacctgaattcgagggaattaaccgatgttttaggcgccagagtcatggacagattaacgatggatagcgggatctgggtagatttcacctggggaagctatcgaaaaaatgtaacgcaccttcgggtgattaagtaa

SEQ ID NO: 151 - DNA, 726 bp, artificial
  Centroid sequence
atggagctatttctgctgagtaacggcaaactttcaggtgaatccgaactgttggggtatgccaagcctcagttgcgggcgatgattgagcgccgtaacatcacttcagcgctgttgattccctatgcgcttatccgcagtgattacgatcaaagggccgaggaattggcacaaacgctgggtatcgcggtcagcagcattcatcatgcggcatcgccggcagcggctatcgagcaggctgaatgtattctgatcagcggcggtaatacctggatgctgaaccagcaactgcatgagcaggggctgatcgtgcctatccagcgtgcggtacgcgagcgtaatgtgccttatgtcggctggagtgccggttgtaacgtggcgacgccaagtattcgcaccaccaatgatatgccggtgcgcaacagcgtggtgttgccggcgctggggctgtttccgctgcaaatcaacccgcactatattgacgcgcatatcagcgggcatatgggggaaacgcgtgatgaacgtttggcggagttctgtgcggtgaatccgagtgaatcggtggtggcgttgcgtgagggcagtctgctgcgagtcagcggcaacgatctgcattatttcagcgcgcgcgagcagggtttcaagattttccgccatgggcaggagccgcaggaatatcacgatacgctggcattgcgcccgctggtgtcgtttgattgtcactga

SEQ ID NO: 152 - DNA, 912 bp, artificial
  Centroid sequence
atgacatcctttatcgatctcgacgtgttcgttcgtacggtggacggcggcagtttttcagaggcggcgcgcgcgctggatatcaccccggcggcggccagcattgcggttaaaaggctggagcagcggctgggggtacggctgttggtgcgctccacccgcagcctgcgcttgacggaggaggggcggcgttatcttgatagcgcccggctggcgttaggcgcgttggcggaaggggagcaggcgatacgcgagaaacaccaggggctttccggcgtgctgcaaatttctgcgccgtcggattttggccgtaacctgttgttgggttggctggacgaattcaagctgcagcacccgcatattcaactgcaattgctgattaacgaccgccaggccgatctgtttcgcgagccggtagacattgcgctgcgctttggccaactggcggattcttcgctggtggcgctgcccattctgccgcagcaccggcgcttaatctgcgccagcccggcttacctgcaacggtatggcgtgccgcagacgccggcggaactggcgcaacacggcattttgatttatcagcccagcgggcgcaggcaggccgaatggcgcttgtggcgtggggatgagtgcattgaagtgccgttgaacggccattattttaccgacgacggcgaggtggcgcggcgttgggcgctggccgggcacggtattgtccgtaaatcggctatcgatgtggtggcggatattcacgcggggcgtttggtgcagctattgccggaatggcaaagcgacgcggtgcccatcagcctggtgtgtccgcaccgttcgcaggtgtcggagcgcgtcaggctgttgcaacgctttttacagcaacgttgccagggctggatggaccatcacttggcctga

SEQ ID NO: 153 - DNA, 645 bp, artificial
  Centroid sequence
atgaatggtgccgatgtcacagtaaacattaattcgcctggtggcgatatgttcgaaggcctggcaatttacaacctgctgagggaataccagggaaaagtgaccgtgaaagtgctggggctggccgccagtgcagcctcaatcattgccatggccggtgacgacattcagatcggtcgtggggcctttctgatgatccacaactgctgggtggtcgcactgggtaaccgtcatgattttgcatccatggttgactatctggagccgttcgataacgcaatggctgatatctattctgcccgctcaggtcttgatagcgaggccgtcaagcagatgatggacggcgaaacctatattggtggcagcgatgctatcgagaaggggttggcagatggcctgctctcctcggattccgtcatgagtgatgacgattcgccctctgcggcgctgcgcaaactggattctttactggccaaggcgaacactccacggtcagaacgtcgcaaacttttgaaagcccttacgggtaacacgccgggcgctgttaccgatccaattggcacgccgagcgctgccgatgcatcccctgaaacgttagccaaactggacgccgcattaaacggcctggtttcggcgtgccaataa

SEQ ID NO: 154 - DNA, 384 bp, artificial
  Centroid sequence
atgaaaatagcccatgttgccctgtggacccgtgatattgatgcgcaggtggcgttctggcagcgttacttcaacggcgtggccggagagttgtacgtcagcaagaatcgcccgggttttgtttcccgttttgtcagcctggctagcggcccaacgctggagatcatgagtttgccggagttgctgccgacggagcaggccaatgaacgagtcggttgggcgcatattgcgctgtcggtcggcgacgaggggctggtcgatcaactggcgcagcgtgcgcagcaggaggggatcctgcaagcgccgccacgctggaccggcgatggtttttacgaagcgatcatccgcgatccggacggtaacgccatcgaaatcaccggttga

SEQ ID NO: 155 - DNA, 1218 bp, artificial
  Centroid sequence
atgtctgaagtaaatgagattttgaaaaaagttaccgcgtctatcgaagatgcgaccggcaaatttaacgccaaggctgaggatgcgctcaaggaggcgaaaaagtccggtgagttgtcagccgagacgaaggacgccgttgataaaatggcgacagaactgaatgccatgaaggcggcagaaaaaacgctgaaggcggcattgggtgaacttgagcagcatgtggcgcaaatgccattaaaccgcgcagctgaagtaatcaaatcagtaggacagcaagttatctccgcctctgccctgaaagatttcgcgtcaggtattcaaggtaatcagcgtctgagcatcccggtgaatgccgcgcttatttccacggatgtgccggggcaaattgtggctccgcagcgcttgccgggtatcgataccgcgccaaagcaacgcctgtttatccgcgatctgattgcaccaggtaccaccggttccagtacgatttattgggtgcaacaaaccggcttcaccaacaaggccgctgccgtacctgaaaacacttcgaagccgtacagcgatattcagtttgcggaaaaaatcacgccagttcgcacgttggcgcatatgttcaaagcctccaagcagattctggatgactttgcgcaactgcaatcaacggtggatgcagaaatgcgctttggcctgaagtatgtcgaagagcaggaaatcctgttcggtgacggcactggcgcacatctggaaggcatcatgccgcaagcatcgaagtatgcaccggcgtttgaagtcacaatgcaaaacggcattgacgatctgcgcctggcaatgttgcaggctcaactggcgcgtttccctgcaaccgggcatgtgttgcacttcaccgactgggccaaaattgagttgaccaaggacacgctgggccgctacatcctggctaacccgtcagcgcttgtcggcccgacgctttggggattaccggttgttgcaacggaagctgcagcgttcctgggtaaattcctgaccggcgcattcagcgcaggtgcgcaactcttcgatcgtgaagaggccaacgtggtgatcagtaccgagaacgccgacgatttcgagaaaaacatgatttcgattcgttgcgaagaacgcgtggcgctggccgtcaaacgtcctgaagcgtttgtcaccggtgcgtttaccgtcccaactccgccagccggctaa

SEQ ID NO: 156 - DNA, 1221 bp, artificial
  Centroid sequence
atgtctgaagtaaatgaaatcctgaaaaaagttaccgcctctatcgaagatgcgaccagtaaattcaacgccaaggccgaggacgcgctgaaagaagccaaaaaatccggcgagctttcggcagaaacaaaagatgccgtcgataaaatggccaccgagctgaatgccatgaaggcggcagagaaaacgttgaagtctgcgttaggtgagctggagcagcatgtggcgcaaatgccattaagcagtgctgctgcggttattcagtcagttggtcaacaggtcatttcggcctcagccctaaaggacttcgcttctggtatccagggtaaccagcgcctgagcatccctgttaatgctgcactgatctctaccgatgtgccggggcagattgtggcgccgcagcgcttgccggggattgatactaccccgaaacaacgcctgtttatccgcgacttgatcgcaccaggcaaaacaggctccagcactatctactgggtgcagcaaaccggcttcaccaacaaggccgccgcagtgcctgaaaacacggcgaaaccgtacagcgatatccagttcgcggagaaaatcacaccggttcgcaccttggcgcacatgttcaaggcgtccaagcagatcctagacgactttgcgcaactgcaatcgacggtagatgcagaactgcgctttggcctgaaatatgtcgaagaacaggaaattctgttcggtgacggtaccggtgctcacctggagggcatcatgccgcaggcgtcgaagtataaagcggcgttcgaagtggcgatgcaaaacggcattgatgatctgcgtctggcgatgttacaggcccagttggcccgattcccatcaacgggccatgtgctgcatttcaccgactgggccaagattgagctgctcaaggacacgctgggccggtatatcctcgctaacccatcagcgctcgtcggcccgacgctctggggcctgccagttgtggcaacggaagcccccgcgttcctgggtaaattcctgaccggcgcattcagcgcaggtgcgcaactcttcgaccgtgaagaggccaatgtggtgatcagtaccgagaacgccgacgacttcgagaagaacatgatctctattcgttgcgaagaacgtgtggcgctggccgtcaaacgcccggaagcattcgttaccggtgcttttacagtaccaactcccccaactggcggttaa

SEQ ID NO: 157 - DNA, 507 bp, artificial
  Centroid sequence
gtgttcatcatcatggataaagaactggaaaacgtccgactgaatctgaaccagctcgcggcaattaccggtgcgcacaggcaaaccattgcagcacgtctaaaaaatgtcgaacccgcacccggcagtaatgccaaattgaaactttataccctaccggatgtgttatcggagttggtgaagattgcaccggtggctgatgttgatgaaatgctgccgcccgatcgcaaagcctggtttcagtcagaacgtgaaaggctcaaatttgagcaggaaacgagcgacttaattccggctgcagaagtcgcccgcgagttttcagcaatggcaaaagcgatggtgcaggtgctggaaacattaccggatatcttggagcgtgattgcgcgttgtcaccatcagctgtttctcgggtgcagtccatcattgacgatctgcgtgatcagatagcgttgaaagttatgcaagcgaatacagagatcgaggaggaaatgcccgaggaggattaa

SEQ ID NO: 158 - DNA, 1179 bp, artificial
  Centroid sequence
atgcgtacacaggtcgccattatcggcgcaggccccgccggattgatgttatcgcacctgctgcatctgcagggtattgagtccgtggtcctggagactcgcagccggcaggcggtggaatccactattcgtgccggggtgctcgagcagggcacggtagatttactgaaccaaaccgggctcggcgaacggatgcgcaaagaaggcgtgcagcaccacggcattcggctggcgtttggcgggcaacagcaccggatagacctcaccgagctcactgaccgggcgatcaccgtttacgcccagcacgaggtgctgaaggacatgatagccgcacgacaagcggcgcaggcccagctctattttgaggtcgagcaggtatcattgcaggcgctggacagcgaacggccgcaggttcattaccgccacgccggcgaacaacggcagctaagctgcgatttcgttatcggttgcgacgggtttcacggtatcagccgggcggcgatgcccggtgggttgcgccaggattacactcggatttatcccttcggctggttcggcattctggtggaggcgccgccttccagtgatgaattaatctacgcccggcacgcgcggggctttgcgctgatcagcacccggtcggcaggcgtgcagcggatgtatttccagtgcgatccgaccgaaaacgtcgatcaatggtcggacgatcgaatctggaacgaactggaaacccggctggaaaatcacgacggctggtcgctgaaaaagggccgtattttccagaaaaacgtggtcggcatgcgcagctttgtcaccgagcccatgcgctgcaaacgcctgctgctggcgggggatgccgcacatatcgtgccgccgaccggggcgaaggggttaaacctggcgatggcggacgtctgcctgctgtcgcaagcgttggaggcgttttatctgcgcaaaagctggcggcggctggacagctacagcgacgatgccctcaagcgggtatggcgcgccgagcatttttcctggtggatgaccaacatgctgcacacccatcctgacggcagcccattccagcagcggctgcagctgtcggaactgcaatatacggtcaagtcgcgcagcgccatgacggtgctggcggaaaattacgtcggctcgccttttcagatgaactga

SEQ ID NO: 159 - DNA, 951 bp, artificial
  Centroid sequence
atgaaaaaattgaaagccacgctgatcgccgcttcgctgctgttgggtgcatttgccctgccgaccgttgcggcgcaggaaaaaccgcagcaaatcaccatcggttaccagaaagccaatatcttcgccctgttgaaatatcgcggtacgctggagcaaaccctgacgccgcagcgcatcaaggtgcgctggattgagtttcccgccgggccgcaaatgctcgaagggctgaacgtcggcagcattgatctggcggctaccggcgatgcgccaccggcttttgcccaggctgccaaagccgatttgatctatctggggcattcgccggccagcccgaaaaccgaagccatagtggtgccgcaggattcgccgatcaaaaccgttgccgacctcaaaggcaaacgagttgcgctgaacaaaggctccgacgtcaactacctgttggtcagcgcgcttgaacaggccgggctgagctacaaagacgtgacgccggtgtatttgccgccgagtgacgcccgcgctgccttccagcgcggcagcgtagacgcctgggtgatttgggacccttactacgccgaggtggaaacccacgccaacgcccgtctgctgaaggatgccgaaggtctggtgccgcattacaccttctatctcgccagccgccactttgccgaaacctacccggacagcgcaaaattggtgatcgaccagctaagtgaactgagcgcctgggccaatgcccatcaggacgacgcagcgaagatcctggcgcaaagcaccgggttggagcaggccatttgggccagagccctcgcccgcatgccgttcggcagccaacgcatgacgccggcggtatttgccgaacagcagcaattagccgacaagttcaccgcgattggcctgctgccggtcaaggtggacgtcagcgccgcacgctggtctgaggataagtaa

SEQ ID NO: 160 - DNA, 1155 bp, artificial
  Centroid sequence
atgactgagtccgtgaaagagaatattaacgttttctggttcctgccgacccacggcgacggccgttacctcggcaccgctcaaggcgggcggccggtggatttaccctacctgcaacaagtggcgctggccgccgacaatctggggtattacggcgtgctgatccccaccggcaagagctgtgaagattcctggctggtggcggcggcactggcgccgatcacccgccgtctgcgctatctggtggcggtaaggccgggtttgcagccgccgagcctggctgcgcgcatggcggcgacgctggaccggctgtcagagggacggctgctgatcaacgtggtgaccggcggcgacccggtagagaacaagggagacggcattttccttaaccacgctgagcgctatgaggtgacgcaggagtttctcgaggtctaccagcgcttaatgaagggcgaaaaggttgattttgcaggcaagcacattcgtgtcgaaggcgcggaactgttgttcccgccggtgcaggaaaacggcccgccgctctatttcggcggttcctccgaagaggctatcggcatcgccgccaaccagatagacacctatctcacctggggcgagccgctggagcaggtggcggagaagctggcggtggtgcgccaacgcgccgaacaacaggggcgcaagctcaactacggcattcgcctgcacgtcatcgtgcgcgagacggaagaggaggcctgggccgccgccgatcggttgataagccatctggacgaaggcaccattgccgccgcgcagaaaatttttgcgcgcatggattccaccgggcaaaaacgcatgagcgcactgcacggcggctcgcgggacgatctgcgcatcggccctaacctgtgggccggcgtcggcctggtgcgcggcggcgccggcaccgcgctggtgggtaatccgcagcaggtggcggagcgcattctcgagtatcggcagcttggcatcgacaactttatcctttccggctacccgcacctcgaagaggcccatcgcttcgccgaactggtgatgccgctgctgccgctggcgcagccgttgaacccgacggcgcgcacggtgaataccggcccgttcggggaaaccatcggcggcgacaaacggccagcctga

SEQ ID NO: 161 - DNA, 969 bp, artificial
  Centroid sequence
atggaaaacaccatgagaaattttatcctgcgccgcctgctgcaaaccctgccgatgctgctgctggcatcactgctgattttctttatcttcgcgctgacgcccggcgattttattgacggcaacattaacctgacgccgcagcgcgccgccgaattacgcgcgctgtacgggctggaccagccactgctgatccgctattggcactggctcggccaactgctgcaaggcaatctcggtttttcgctgcagtaccagatcccggtcagcaccttgttgaatcagtacatctggaattcgttcctgctggcttcggtcgccctggtgctgtactggggcattgcgctggcggttggcgtggcttcggcgatgaaaccctattcgctgttcgaccatctggtcacggtggcggtgttcggcgccatgtcatttccgacctttttcctttgcctgctgctgatcaaatggtttgccgtcgatctgcattggctgccggcggggggcatgctgcgcaccggcagcgaagcgaccgggctggcctgggtggcagaggtggcggcgcacctgctgttgccggtgctggcgctggtgatgctgcaggctggtaccctgacgcgctatttccgcgccagcatgctggatgtgatccgcatggactacatccgcaccgctcgcgccaaaggcctgaaggagaaaacggtgatcgtcaaacacgcgctgcgtaatgccttgctgccgatcatcacgctgctggggtttgaattaccggcgctgttttccggcgcgctgatcaccgaaaaaatcttcaattggccaggggcggggcacatccacatcgactcgctggccgcccgtgactatccggtgctgatgggcttcacgctgtttctggcggtgctgaccattttgggcaatctgctggcggacattctgtacgcctatgccgacccacgaattcgtttgaggtga

SEQ ID NO: 162 - DNA, 960 bp, artificial
  Centroid sequence
atggattacaccaaaatcattaaagagatcggccgtggcaagaaccatgcgcgcgatctggatcgggaaaccgcctttcagctctatcaaaagatgctggccgatgaggttggcgaattggaactgggtggcatcctgattgccatgcggattaaaggcgaagccgaagaggaaatgctcggcttttatcaggcgatgcaacagcaggtgatccgcctgcaggctccgtctgggcgaccgatgccggtagtgttgccgagctataacggcgcgcgcaaacaggcgaacctgacgccgctactggcgctgttgctcaaacgtgtcggtctgccggtggtggtacatggcgtgctagatgacagcacccgcgtcaccagcgccgaaaccttccaggcgttgggcctgccctggtcgcaagatgttgctcatgcgcagcagcgcctggatgcaggtgaagtcgtgtttatcccggtttccaccttgtctgcccctctggagcgtcaacttggcctgcgctggcgcatgggggtgcgtaacagcgcccataccctggccaaactggccaccccgtttgccgagcaggatgtgctgcgtattgccagcgtgtcgcacccggaatacgtcggccgtgtggcctcgtttttccgccaaatcggcgctcgtgggctactgatgcacggtaccgaaggcgaggcctatgccaacccgcagcgatgcccacagatccattacatggttaacggcgagcagcaggtgctgctggaacgaccggcgcaggatgaaattcccgagctgccggcggcaaaagatgccgaaaccaccgcgcgttggactgaacgttgcctggcgggtgaggtggcgatcccgctggcgatccaacgccaggttgcctgctgtctgctggccgccggtgaggttgacaccctggaacagggtttggaacgtttacgcagcgcgtaa

SEQ ID NO: 163 - DNA, 1182 bp, artificial
  Centroid sequence
atgtcacaaaccttactacgtgtacgcgatggccatggggcctcggtttcgttctcggaactattgttcgatctgatctacgtttttgccgttacccaactttcccactatctgctgcatcatctgacgttaaccggtgcgctggaaaccctgttgttatggttcgccgtctggttggcgtggcaatacacggcctgggtcactaactggtttaacccggatactcgcccgattcgcatcctgctgttcgccatcatgctgttggggttgttcgcctcatccgcgctgccgcaggcatttggtgaacgaggactgacgttcgcactattttacgtggcaatccaggttggccgttcactggtagtcctgaatctgttaccggcccaccatccgctaaaacaaaacttccagcgcattctcggctggatgtgcatctcggcgattttctggatcctcggtggcctgacggagggcaaccatcgactgctgctgtgggccgtggcggtcctgtgtgaatacgtttcgccgatgttcggtttccgcttaccggtgcttggccgttccgacagcagcagcgaatggacgattgaaggccatcacctggcagagcgctgccaactgtttgtcattgtggcactgggggaaaccattctgatcaccggttccaccctcagcgaaatggagtcctggacagcgccggtgctgattgcgtcactggtggcctttctcggcagtctggcgatgtggtgggtttatttcgataccagcagcaaagccggcagccatgccatcagtcaggcagcaaaccctggccagttgggtgcctatttccattatgtccatgtggtactggtgggcgcgatcatcgtctgcgccgtcgccaatgaactggtgatcgcccaccctgacggccacatcaataacgtgacggcagcggtgctactgctgggcccggcaatttatctgctcgccaatgcgctgtacaagagactggtgtatcgccgtttcccgctgtcgcacttactggggctgatcgcgctggcggtgctggcaccgattgcctatctcaccgatttattgatggtgaacggcctgaccacgctgattatggtggccgtggcggtatgggaaagcatctcgcgtggcaaagtgtcacaggctaaccgcgacgctatcatataa

SEQ ID NO: 164 - DNA, 897 bp, artificial
  Centroid sequence
atgaaaatcaccctcgaagaattgctggcgtttacctccgtggtcgacagcggctccattacctccgccgctgaacagctcggccaaaccacgtccggcatcagccgcgcactcagtcgcctggaaaagaaactcgacaccaccctgatgcgccgcaccacgcgccggcttgagctgaccgaagaaggccaaagctttcttggccatgcgcgcgacattatccgttcggtggagaacgccgaagagcagatggcgctgcgcaggctgatcccggccggcaaattgcgggtcaacgccgccgccccctttatggaacacgtgatcgtgccgctggtggcgggatttcgccaaagttatccgcagatcgagctggagttgaataccgacaacctgattatcgatctgctggagaagcgtaccgacatcgccattcgcatcggcatattgcgcgactcaaccattcatgcgcgtctgctgggggccagccgtttgcgtattctcgccagcccggattaccttgaacgttacggcaccccgaacagcgtggaagcgctgcgcgaacactgcctgctcggctttacccaaccggaatcactcaatctgtggccgctgcgcaaccctcaggcgccgcatttcgccatcacgccgactctctcggcatccagcggcgaaacgctaaggcaactggcgttacgtggcgaagggatagtgcagttggcggatttcatgacgcgtgacgatcagcgcagcgggcggttggtgcagttgctggaacaggacacgctggatgtgcgccagccgattaatgcggtgtattaccgcaatacccagctggcggcacgtattacctgttttctggactacgtcagcgcgcatatcgacgcgcagacgctgtag

SEQ ID NO: 165 - DNA, 213 bp, artificial
  Centroid sequence
atgtctaacaaaatgactggtttagtaaaatggtttaactctgataaaggcttcggctttatcactcctcaggacggtagcaaggatgtgtttgtacatttctccgctatccagagtaacgattttaaaacgttagacgaaggtcaaaaggtggagttctccgtggagaatggcgctaaaggcccgtctgctgttaacgttgtcgcgctgtaa

SEQ ID NO: 166 - DNA, 1176 bp, artificial
  Centroid sequence
atgcctctcgcattacttgcattgaccattagtgcctttgctatcggcaccacggagtttgtgattgtcggacttatcccgactatcgcagaacagttgggggtgacagtgccgtcagccgggctgctggtaaccatttacgctatcggcgtggctattggtgcaccggtgctgacagccttaaccggtcgcgtgccgcgcaagttgttgctgatcagcctgatggtgctgttcactctcggtaacttattggcctggcagtcgcctggctatgggacgctggtggtggcccgcttgttgaccggcctggcccacggggtcttcttctcaatcggttcgactattgctaccggcctggtcgcgaaagagaaggccgcctcggcgatcgccatcatgtttggtggcctgaccgtggcgctggtgacaggggtgccattggggacctttatcggtcagcactttggctggcgtgaaaccttcctggcagtatcactgattggtgtaatagccaccgtagccagcgctattttggtgccaaacaacattaaaaatcaggccagcgccagtattaaggaacagtttaaagtgctgacccatcctcgcctgttgctgatttacgccattactgcactgggttacggcggcgtgttcacgactttcaccttcctggctccgatgatgcaggagttggcgggcttttctgctccggcagtcagctggatcctgctggcctacggcattgcggtggcgataggtaacatctgggggggcaaactggcggatcgtcacggggcggtacgcgcactcagctttatttttgccgtgctggccgttctgctgctggtgttccaattcaccgccagccacagcattgccgcgttgctgacggtgatcgtcatgggagtgtttgcctttggtaatgttccggggctgcaggtgtatgtggtacagaaagccgaacaatacacgccgaacgcggtggatgtggcctccggcctgaacattgcggcttttaacgtaggtattgcccttggttcggtgattggtgggcaaacggtagccactttggggttggcacaaactccgtggattggtgctttgatcgtgctggtggctctattattggttagcctaagtggacgtttggataagaaatatcggccgcaattagcctaa

SEQ ID NO: 167 - DNA, 969 bp, artificial
  Centroid sequence
atgtcggctgagtggttagtggaagtcaaaggtttgaagaagcattttccgctgcgggaaggcctgttcggccggactaccgggcagctgcgagcggtggatgacgtcagtttcggcattcgaaaaggcacgattttcggcctggtgggcgagtccggcagtgggaaaaccaccgtcggtcgcacgctgctggggctgcatgacaaaaccgccggtgaggtgctgttcaagggacaggcgctggatgcgctcagcccacgacggctgcgtgagatgcgcccgaagatgcagttggtgtttcaggatccctacagttcgctgaacccgaggatgcgcattggcgatgcgattggtgaagccctgttgcaacatgggttggcgcagagaaacgagctgcgtgatcgggtgatcgacaccatggagatctgcgggctgtcggcgcagcactacggccgttttccgcatgagttttccggtggtcagcggcagcgtatcggtattgcccgcgcgctgatcctgcagccggaatttattgtcgcggacgagccgatttcggcgcttgacgtctcaatacaggcgcagatcatcaacctgttttccgatcttcaggagcagcagggggtgaccttcctgtttatttcgcacgatctcggggtggtggaacacctgtgtcaggacgtggcggtgatgtatctcggccagattgtcgagagcgcagaccgcgacagcctgtttggccaaccgcgccatccctatacccaggcgttgctggcggcggtgcccagtctggatccgcaacgccagccgcaggcgatggcgcggggcgaactgcctaacccggcgcaaccgccgcacggctgtcgttttcacacccgttgtccgcaggccaccgcgcagtgccgggaacaggccccggcattacggacggtgtcagcagggcatcgggtagcctgccattatgccgattag

SEQ ID NO: 168 - DNA, 783 bp, artificial
  Centroid sequence
atggcagaaaattacttccatattgcggccttcaccggtaaagggtttcggggcaatccggccggcgtctgcctgttaaagcagccgttgtcggctgcggagatgcaggccatcgccaatgaactgagcctgccggaaaccagctttgtctgggacgatggcgatatgtcggccatccgttggtttactccccagcgagaggtcgatttgtgcggtcatggcacgctggcggcggcacacgtgatgttcagcgtggtgaacccggcgctgcaggatattcgtttccgctcggcgagcggcgacttgtacgttaaacgcgacgccgaagatggcgaacgcctggtcctggatttcccgtcccggccaccgcagaaggttgtggagcctgaagggttggcggcgctgctgggggctaatccgcaggaagtgtggcaggccaatgcgctgttggtggtattggaaaacgaagcgcaggtcagggcattacagccggatatcccggcactgattgccctggttggccgggccgtgattgtcagtgctccgggtgagacggcggattttgtctcgcgctattttaccctcgacggcggcgaagatccggtgaccggctccgcacactgcacgctgatgccctactggagcgcacgtcttggtcgccatcagctgcacgcccggcagatttcggcgcgcggcggcgagttgttctgtgagctgaagggcgatcgcaccttgattggcggctatgcacacacgtttttgcgtggggaattgagcttgtaa

SEQ ID NO: 169 - DNA, 525 bp, artificial
  Centroid sequence
atgaaacattattggtatgcggccttcggcctgatggcctgtggcgtcgcccaggcggcagcggtggatgttgacatgaatctggtgaccggacagggaattggccaggagattggcaaagtcacgatcagcgaaacgccttacggcctgctgtttacccctcagttaaaagcgttgccggccggagtgcacggctttcacgtgcatgagaacggcagttgcgagccgggaatgaaagagggtaaggcggtagcggcgctggcggcgggtgggcattttgatccgcaaaaaaccggcaagcaccttggcccttacgcagacggccatttgggcgatctgccggccatttacgttacggcagacggcatgtccacggatccggtgctggcgccacgtctgaaaaaaatcagcgaaatcaccggcaaagcgctcatggtacatgccggcggcgacaaccactccgatcatccgaaacccttgggtggcggaggggaacgttttgcctgcggtgtgattaaagggtaa

SEQ ID NO: 170 - DNA, 534 bp, artificial
  Centroid sequence
atgaacagtttcgttaaacgcctgttgctgcccgtgattgccggctctgtgctgttttccggcgcggccctggcgatggggggtgacggcagcggccaaaccacgccaacctgcccgaaaggccagatatacgacacaaaaaccaagacctgcatggtggataaaagcagcatgatcggcgacaacgatcgggcgaactacgcctatgcgctggcgaaaagcggccgctatcaggatgccctcgacgtgctgaacactctgaaaaaccccaacaccgccgtggcattgaactaccggggttacgccacccgcaagctcggacgcacggatgaaggcatcggctactatttaaaatcagtagcgctcgatcccaactacccaaaagtccgcgaatacttgggtgaagcctatatggtgaaaggtcgcccggacctggcgaaagagcagctcaaggtgatccagtcgctgtgcggcaccggttgcgaagagtaccgcgacctggcggcagccatagatcaccatcccgaatcataa

SEQ ID NO: 171 - DNA, 951 bp, artificial
  Centroid sequence
atgttggcaacgctgttttttggtcgccgtcgtcgctggcggcaggcgcaacttccggcgctggcgcagttgtcgccaccgccggctgcacaggcctggcaacggctgcggcgccaccggctggcgatggcctcgctgttgttgctgctgatcctggccgtgctgtgcattttggggccgatgctgtcgccgtggcaggacgacgccggcgacgcgctgaacattaaccaggcccccaatgccgcgcactggttgggtacggattttctcggccgcgatatttacacccggctgctgttggcggggcgcatctcgctgaccatcggcctggtgtcgatggtgctgtcggtgacgctcggctacctgttgggggcgttatccggctatttgggcggcatcgtggataagctgatcatgcgttttgccgatctgttgatgaccatccccagcctgccgctgctgatcattatgggagcgatgttgtccgagctggacgtctcgccggattaccgcatctacatggtgatgatcatgctcagcctgttgggctggccttcgctggcgcggctggtgcgcggccaaatcctgtcgctgcgcgagcgtgatttcatgctggcgaccgaagtgctggggctgtccacgcggcgacgtattttcggccacctgctgccgaataccatcccgatcctggtggtggtggcgaccatgggggtggccaacgccattctcagcgaatcggcgctcagctatttggggctgggtgtggtaccgccgacgccgtcgtggggcaacatgatggatgccgccaacagcctgatcgattttcagcgtcgcccctggctgtggatgccgccgggtctggcgatttttatcaccgtagtggcgattaacattctgggcgacggcctgcgggacgcgctcgatccgaaaatgaacggggtaagacgatga

SEQ ID NO: 172 - DNA, 243 bp, artificial
  Centroid sequence
atggctaatttttcaagagaacaggttgaagcgcagatctgcgatcaactggtgcgtggtggacttccggttgatgtagcgcgttctgccgcagtgcagggcgccaatcattatttaacccgcccaaacgcgactatcgccagcagtctcgctgtcgcaaagacgtacgcaaagccgctaaagcgggtgaagggcaagccagaccgtccgcatgtgccagggcgccggatggggcgccggtga

SEQ ID NO: 173 - DNA, 930 bp, artificial
  Centroid sequence
atgcagttgccacaattagtcaatatgtttggtgccgatcttcaacgccgtcatggcgaaaaggtccataaactcacgctgcacggtggtttcaactgcccaaaccgcgatggcaccgtagggcgcggcggctgcaccttttgcaatgtggcgtcgttcgccgatgagcaaatgcgccggcaaaccatcgccgaacagctggcggcgcaggctggcaaggtcaatcgcgccaaacgctatctggcctattttcaggcctataccagtacctatgccgaggtggcgctgctggaaagcctgtatcggcaggcgcttgagcaggcgaacatggtgggcatctgcgtcggtacccgaccggactgcgtaccggaggcagcgctcgatctgttggccggctaccgtgcccaggggtatgaagtatggctcgaactggggttgcagaccgcacacgataaaacgctgaaacgcatcaatcgcgggcatgatttctgctgttaccaacagaccgcgcggcgagcgcgcgaacgtggcctgaaggtctgctgccatctgattgtcggcctgccgggcgaaacgccggccgatcatctggcgacgcttgtggcggtagtagccgcaggcgtagacggcatcaaactgcatccgctgcaggtggtggccggcagtatcctggcgcgcgcctggcaggccgggcgtcagccggtactgacgctggaggactatgccgccagcgccggtgaaatgatccgccatacgccgcgcgacgtggtgtttcatcgtctgtctgcctatgcgcgccggccgacgttgttggcaccattatggtgcgaaaaccgctggagcggcatgcaggcggtcggtagctatctgttacgtcacggcggacaaggtgccgcgctggcggcggcgttgcgctacgcccctgtctga

SEQ ID NO: 174 - DNA, 1032 bp, artificial
  Centroid sequence
atgcgcgcgctagcactgaaaggctggatgacgatggtggcgcttggcgccaccctgttgctgaccggttgcggaccggaacaggtcaatctcgatggcaaaaccatggggacgtactattcgatccgttatctcaccggtgacaacacgccttccgccgagacgttgcaaaaggaaatcgatcggcgtctggagcaggtgaatgaccagatgtcgacctaccggcccgactcggagctgagccgctttaacgccagccgcgaggtcgatacgccgttcccggtatcggccgcgacggcgaaggtggtggccgaagcgctgaggattaaccgcgtgaccgacggtgcgttggacgtgaccgttgggccgctggtcaatctctggggttttgggccggaagggcggccggacaaggtgccgagcgatgccgaactggcgcagcgccgtgcctggaccggtatcgataaactggcggtgcggggcaacgcgctggtgaagcatatccccgagctgtacgttgatctgtcgtctatcgccaagggttatggcgtggacgtggtggcggaatacctgcaatcacagcagattaacaactatatggtagatatcggcggcgaagtacgcacccgtggccataacggtaaggagctgccatggcgcattgctatcgagcggccgaacgccggagtggagcaacgcgcgcaactggtgatccaaccggggaatatggcgatcgccacctcgggggattatcgtaactatttcgaacagaacggcgtacgttattcacataccatcgatccgactaccggcaggccgatcgcgcaccatctggtgtcgatcacggtcattgggcctaactgcatgaccgccgacggcctgtctaccgggctggatgttatgggaccggatcgtgccctggctctggcgaatctgctgggcattccggtgtttatgatagtgaagaacggtgacgtttttgaagagcgctattccaatgcgtttaaaccttatctaaagaaaaatcagtga

SEQ ID NO: 175 - DNA, 807 bp, artificial
  Centroid sequence
atggctaaggtcactgtttttgaggtggggtactgtacccatatcggctgtatggcgctgcgcggtgcgggattccgggtgtgcaaattcccggcccgcgcttatttgcttgaagtgggggatcgccgttggctgtgggataccggctatgcgcactatttccagcagcagacgcagtccggcattttccgcatctaccgccaaatgacgccggtgtatttcgacccccgtgagtcactgaaccagcagttgctgtctgccggttacgccgctaatgatattcaggcgctgattatttcgcactttcacgccgaccatattgccgggctgcgtgatttcaaacacctcgattttatctgctctggcgaaggctggcggcaaactcgtaccttacggggcttcgcggcgttaaaacgcgcctttatccccggtttgatccctgatgattttgagagtggcctgcagtttatcgagggtttccaacaggtcagcctgcctgcgctgctggcaccctttgatcgcggctatgcgctgccgggcagtgaagggcagatcctgctggttgatttgccggggcatgcggccgggcacattggcgcgtttattctcaccgacgctggctggacgctgctggccagcgacgcggcctggtcaccgctgagctatcagcaattgcgcgggccttcacgcttggccaatctggtgatggacgacgccaaggcttactaccgcacgctggagcgcctgaatcagctatgggcgagcggcaacgcgaatattttactctgtcatgagggggatttatga

SEQ ID NO: 176 - DNA, 804 bp, artificial
  Centroid sequence
atgagcatccctgcatttggtttaggtaccttccgtcttcaggatcaggtcgtcatcgactcggttagcacggcgctggagctggggtatcgcgccattgatactgcacaaatctacgaaaatgaagctgcggtgggccaggcgattgctgccagcggtgtgccacgtgacgagctgtttatcaccaccaaaatctggatcgccaatctggcgaagggcaagctgatcccaagcctgcgggagagcctgactaaactgcaaaccagctatgttgacctgactctgatccactggccttcgccgaatgacgaagtctcggtggccgagtttatgactgagctggcggaagccaaaaaactgggcctgacccgccagattggggtctccaacttcactttggatctgatgcaacaggcgattgatgccgtgggtagcgatcagatcgccactaaccaaatcgagctgtcgccatatctgcagaaccgcaaagtggtggaatttgcccagcagcatggcatcgccatcacttcctatatgacgctggcctatgggcaggcactgcaggatgagaccatcaaggccatcgcggcacgccgccatgctactccggcgcaggttatcctggcctgggcgctgcaactgggttacgcggtgatcccatcatcaaccaagcgtgaaaacctggcgagcaacctgttggcgcaacagctaacgttgaccgccgaggaaatggcggaaatcgccaaattggaaaacaatggccgtttggtcagcccggaaggtctggcacctaactgggattga

SEQ ID NO: 177 - DNA, 1455 bp, artificial
  Centroid sequence
gtgctgcaacgtttgataactctgacattccccctgttactggcaggctgtatttcactggatccggactaccagcggccgcaggcgccggtgccggcaaacctgccgcaaggtgccgcctatgccacgccgagcggtaagctttcgctgagctatccggatatcccgtggcgcgattatgtggtggatgcccggctgcggcaggtggtggcgatggggctgagcagcagccgtgatctgcgtgaagcgatcgccaacattgagtcggcgcgagcgttatacggcgaacaacgttccgaactgttcccaaccatcaacgcaggggtggacggcacgcgttcacgctctttgaccggcaacggcaatgcgaccgcgatcagccagagctacgaagccagcgccggcaccagttcgtttgagttggatctgttcggtaaaaaccgcagcctgtcgcgcgcaaaattcgagacctatctggcggagtccgaggcggcaaaaagtacgcgcctgacgctgatcgccgatatagtcaccgactgggtgaacgtggcggcggaacgcagcctgttggcggccgccaaagacacgatggaaagcgccaggctgtcgctggaggtgacgcgtaaaaaccagcaaaacggcattttgtcgatggtggatgtggcttcggcggacacggtttatcagcaggcgcgttcggacgtcgccagctataccaccagtgccgcgcaggcaaaaaacgcgctggatctggtggtggggcaaagcgtgcccgaaagcctgttgccgaacgggatcgaggcgctgtccggcatcatgaaagacatgccggccaatgtgtcgtcgcaagtgctgctgaaccggccggacgtcctggaagccgagcataatctgaagtcggccaatgccagcatcggctccgcgcgcgcggcgttcttcccgtcgatcagcctgaccgccagcggcggcgtgggcagcggggagctgtcgtccctgttcagcaagggcgccggcgtctggtcctttgcaccaagcatcagtctgccgattttcaccggcggctataacacctcgcagctcaactacaccaaggcgcaaaaggatctgtacgtcgccacctatgaaaaagcggtgcagacggcattccaggaaacggccgatgcgctggcgcgcaaaggcaccattggggagcaactggcggcgcaaaccggctacgtggctgcctcgcgggaatattaccgcctggctgaactgcgttatcggcacggcgtggatacctacctgaacatgctggacgcgcagcggacgctgtacaccgctcgccaatcgttgatcagcgcgcagcaaaccgagtaccagaacctgattacgctgtataaggttctggggggcggcattacggcggagaagcagggggatagcgtggtcgccaatagcgcgaccctgacccgttaa

SEQ ID NO: 178 - DNA, 534 bp, artificial
  Centroid sequence
atgaacagtttcgttaaacgcctgctgttaccagtcattgccggttctctgctgttttccggggcggccctggcaatgggcggtgatgatagcggtcagaccaccccaacctgcccgaaaggccagatatacgatacaaaaaccaagacctgcatggtggaaaaaagcagcatgatcgacgacaacgatcgggctaactatgcctatgcgctggcaaaaagcggtcgttaccaggaggcgctcgacgtgctcaataccctgaaggatcctaacaccgcggttgcactgaactaccgcggttacgctacccgcaagctcggccgcaccgatgaagggatcggctactatttaaaatcagtcgcgctcgatccgaaatacccgaaagtccgtgaatatctgggtgaggcctatatggtcaagggccgtcaggatttggcgaaagaacaactgaaggtgatccagtcgctatgcggtaccggttgtgaagagtaccgcgatctggcggcagccatcgatcaccacccagaatcatga

SEQ ID NO: 179 - DNA, 897 bp, artificial
  Centroid sequence
atgaaaatcaccctcgaagagttactggcgtttaccaccgttgttgatagcggttccattactgccgccgccgaacaacttggccagaccacctccggcatcagccgtgccctcagccggttggaaaaaaagctcgatacgaccctgatgcgccgcaccacgcgccggttggagctgaccgaagaaggccaaagttttctcggccatgcgcgtgaaattatcaactcggtggagaatgctgaagagcagatggcgctgcgcaggctgatcccggccggcaggctgcgggtcaatgccgccgccccctttatggaacacgtgattgtgccgctggtggcgggctttcgccaaagctacccgcaaattgagctggaactgaataccgataacctgatcatcgatctgctggagaaacgcaccgatattgccattcgcatcggcgcgctgcgggattcgaccattcatgcgcgcctgctgggggccagtcgtttacgtattctcgccagcccggattacctcgcacgttacggtacaccggccagcgtcgaagcgctgcgagatcacagcctgctgggcttcacccaaccggagtcactcaatctgtggccgctgcgttatcagcaggcacagcattttgctatcacgccgacaatttcggcatccagcggcgaaaccttgcgacagctggcgttgcggggtgaagggattgtgcaactggctgattttatgacccgtgacgatcagcgtagcgggcggctggtgccgttgctggagcaggatacgttggatgtgcgccagccgattaatgcggtctattaccgcaatacccagctggcggcgcgtattacctgtttcctggactacgtcagcgcgcatattgatgcgcagatgctttag

SEQ ID NO: 180 - DNA, 2430 bp, artificial
  Centroid sequence
ttgcccgtcagcgcgatactcgatgaactgctcactgcattgcacagcgcaccgcaggtgctgctgcacgcccctaccggtgccggaaaatcgacctggctgccgttgcagatcctggcgcgagcgggattgccggggcgcattatcatgctcgagccccgccggctggcggcaaaaaacgtcgcttaccgcctggcgcagcaactgggggaagagccgggcgcaacggtgggctacagcatgcgggccgaaacgcgcagcgggcctgatacccgcctgatggtggtgactgaaggggtgctgacccgcatgttgcagcaggatgccgaattgcagggcgtctcgctggtgatcctcgatgaatttcatgagcgcagcctgcaggcggatttggcgctggcgctgctgctcgacgtgcaacaggggctacgtgacgatctaaagctgctggtgatgtcggcgacgctggacaatgcgcgcctgtcaccgctgttgccggacgcgccggtggtggtgtcggcagggcgcagcttcccggtagagcgtcactatcattctctggccagctacccgcggctggaagatggcgtggcggcggcggtcaagcgcctgctggctgagcagcacggctcgctgctgctgttcctgccgggggtggcggagatcaaccgggtacaggaacgccttaatggtgccgtcgccagcgatgtcgatctttgcccactgtacggcgcgctgccgctcgcacagcaacagcgggcgatccagccggcggctgccgggcgacgcaaggtggtgctggcgaccaatattgccgaaaccagcctgaccatcgaaggcatacggctggtggtcgacagcgggttggagcgcgtcgcgcgttacgacccgcgcagcggtctgacacggttgctgacacagcgtatcagccaggcgtcgatgatccagcgagccggccgcgccggacgcctggagccgggcatctgctggcatctgtttgccagggagcagggcgagcgcgccgccgagcatgccgaggcggaaataggacaaagcgatttgtgcggtttttggctggagctgctgcaatggggctgtgtggatcccgggcaactgacctggctcgatgcgccccccgcaagcgcactggcggcggcgcaacgcctgctgcattcccttggcgccaccgacgacggcggcaagctgaccgtcgccgggcggcaaatggcgatgatgggctgtgaaccccgactggcggcgatgctgcatgccggcgcgcaatcaggcgccgatgggctggcgaccgcggcgctgctggcggcactgttggaggagccgccgcgcgggggagccatggatatcgattactggctgagtcgcccgcagccgcattggcaacggcgcgcgcgccagcttgcccaacggctgccggggcgtgccggtcaggtggatgtcacgctggcgccgcgtttgctggcgcaggccttcgccgaccgcattgcccaacggcgtggccaggatggccgttacctgttggcaaacggcatgggtgccgcaatggatcaggatgaggctctgtcgcgcacgccgtggctgattgcacccgcgttgttacagggagccaacagtcccgatgcacgcatcctgttggcgttgccggtagatatcgaggcattggccgcacagttgccgcacctgatacggcagcagaccgccgtcgagtgggatgaggagaagggcacgctgcgcgcctggcagcgccagcagattggccgcctgacgctgaaagcccgaccgttggcaaaaccggcggacgacgcgctgcaacaggcgctgatcgagtgggtacgcacgcaggggctggcggtgctgggttgggatagcgcagccgagcaactgcgtattcgtttacaatgcgcacagcgctggctgccggaggccgactggccagcggtggatgatgagaccctgttggactcgctggagcgctggctgctgccatctctcggcggcgtgcgggatttacgcgggctcaagcaggtcaaccttgccgaggcccttggtcggctgctcgactggcaacaaaagcagcggctggataatgcgttgcccactcattacactgtgccgaccggcagtcgcctgccgatccgttacgatgcggacaagccgccgctgttgccggtgcgtttgcaggaaatgtttggtgaacagcgcagtccgatgctggccgagggtcgcatcgcggtggtgcttgagttactctctccggcgcatcgaccgctgcaaattaccggcgatctggcggcgttttggcaaggggcctaccgcgaagtgcaaaaagagatgaaagggcgctacccgaagcacttatggcctgacgacccggccaacgccgctccgacgcggcgtaccaagaaataccaatag

SEQ ID NO: 181 - DNA, 1014 bp, artificial
  Centroid sequence
atgaaaaccagcactgcaccgctaccaccgctgcgttcggtcaaggttctggaccagttgcgtgagcgcatacgctacttgcattacagtttacgaaccgaacaagcgtatgtccactgggttcgtgccttcatccgtttccacggtgtgcgtcacccagcaaccttgggcagcagcgaagtcgaggcattcctgtcttggctggcgaacgagcgtaaggtttcggcatccacacatcggcaggcattggcggccttgctgttcttctacggcaaggtgctgtgcgcggatctgccttggcttcaggagatcggaagacctcggccgtcgcggcgcttgccggtcgtgctgaccccggatgaggtggttcgcatcctcggttttctggaaggggagcatcgtttgttcgcccagcttctgtatggaacgggcatgcggatcagcgagggtttgcaactgcgggtcaaggatctggatttcgatcacggcacgatcatcgtgcgggagggcaagggctccaaggatcgggcattgatgttgcccgagagcttggcgctcggcctgcgcgagcagctggcgcgtgcccgggcatggtggctgaaggaccaggccgagggccgcagcggcgttgcgcttcccgacgcccttgagcggaagtatccgcgcgccgggcattcctggccgtggttctgggtttttgcgcagcacacgcattcgaccgatccacggagcggtgtcgtgcgtcgccatcacatgtatgaccagacctttcagcgcgccttcaaacgtgccgtagaacaagcaggcatcacgaagcccgccacaccgcacaccctccgccactcgttcgcgacggccttgctccgcagcggttacgacattcgaaccgtgcaggatctgctcggccattccgacgtctctacgacgatgatttacacgcatgtgctgaaagttggcggtgccggagtgcgctcaccgcttgatgcgctgccgcccctcactagtgagaggtag

SEQ ID NO: 182 - DNA, 765 bp, artificial
  Centroid sequence
atgacggatttcaagtggcgccatttccagggtgatgtgatcctgtgggcggtgcgctggtattgtcgctatccgatcagctatcgcgaccttgaggaaatgctggcggaacgcggcatttcggtcgaccatacgacgatctatcgctgggtccagtgctacgccccggagatggagaagcggctgcgctggttctggcggcgtggctttgatccgagctggcgcctggatgaaacctacgtcaaggtgcggggcaagtggacctacctgtaccgggcagtcgacaagcggggcgacacgatcgatttctacctgtcgccgacccgcagcgccaaggcagcgaagcggttcctgggcaaggccctgcgaggcctgaagcactgggaaaagcctgccacgctcaataccgacaaagcgccgagctatggtgcagcgatcaccgaattgaagcgcgaaggaaagctggaccgggagacggcccaccggcaggtgaagtatctcaataacgtgatcgaggccgatcacggaaagctcaagatactgatcaagccggtgcgcggtttcaaatcgatccccacggcctatgccacgatcaagggattcgaagtcatgcgagccctgcgcaaaggacaggctcgcccctggtgcctgcagcccggcatcaggggcgaggtgcgccttgtggagagagcttttggcattgggccctcggcgctgacggaggccatgggcatgctcaaccaccatttcgcagcagccgcctga

SEQ ID NO: 183 - DNA, 561 bp, artificial
  Centroid sequence
ttgcagggacaacgcatcggttacgtccgggtcagcagcttcgaccagaacccggaacgccaacttgaacaggtcgaggtcggcaagctgttcaccgacaaagcctcgggcaaggacacccagcgtccccagctggaggccatgctcggtttcgttcgcgaaggcgacaccgtggtggtgcacagcatggatcgcctggcacgaaacctcgatgatttgcgccgcctggtgcagaagctgacccagcgcggtgtgcgcatcgagttcttgaaggaaggcctggtgttcaccggcgaggactcgccgatggccaacctgatgctgtcggtcatgggggcctttgccgagtttgagcgcgccctgattcgcgagcggcagcgcgagggcatcgccctggccaagcagcgcggtgcctaccggggccgcaagaaagccctctccgacgagcaagccatcacgctgcggcagcgggccgctgcgggcgagccgaaggcgcagctcgcccgcgagttcggcatcagccgagaaaccctctatcagtaccttcgcaaggacgactga

SEQ ID NO: 184 - DNA, 561 bp, artificial
  Centroid sequence
gtgcaggggcaccgcatcggctacgtccgggtcagcagcttcgaccagaacccggaacgccagctggaacagacacaggtgagcaaggtgttcaccgacaaggcatcgggcaaggacacccagcgcccccagctcgaagcgctgctgagcttcgtccgcgaaggcgatacagtggtggtgcacagcatggaccggctggcccgcaacctcgatgacctgcgtcgcttggtacagaagctgactcaacgcggcgtgcgcatcgagttcctgaaggagggcctggtgttcactggcgaggactcgccgatggccaacctgatgctgtcggtgatgggggccttcgctgagttcgagcgcgccctgatccgcgagcggcagcgtgagggcatcaccttggccaagcagcgtggcgcgtaccggggccgcaagaaagccctgtccgatgagcaggctgctaccctgcggcagcgagcgacggccggcgagcccaaggcgcagcttgcccgcgagttcaacatcagccgggaaaccctctaccagtacctccgcacggacgactga

SEQ ID NO: 185 - DNA, 417 bp, artificial
  Centroid sequence
ttgactccgtacatgagtacggaagtaaggttacgctatccaatttcaattcgaaaggacaagcgcatgtctgaaccaaaaaccgggcgcggcgcgctcttcactggagggcttgccgccatcctcgcctcggcttgctgcctcgggccgttggttctgatcgccttggggttcagcggcgcttggatcggcaacttggcggtgttggaaccctatcgccccatctttatcggcgtggcgctggtggcgttgttcttcgcctggcggcgcatctaccggcaggcagcggcctgcaaaccgggtgaggtctgcgcgattccccaagtgcgagctacttacaagctcattttctggatcgtggccgcgctggttctggtcgcgctcggatttccctacgtcatgccatttttctactga

SEQ ID NO: 186 - DNA, 435 bp, artificial
  Centroid sequence
atggaaaacaatttggagaacctgaccattggcgttttcgccaaggcggccggggtcaatgtggagaccatccgtttctatcagcgcaagggcttgttgctggagcctgacaagccctatggcagcatccgccgctatggcgaggcggatgtaacgcgggtgcgcttcgtgaaatcagcccagcggctgggcttcagcctggatgagatcgccgagctgctgcggctggaggatggcacccattgcgaggaagccagcagtctggccgagcacaagctcaaggacgtgcgcgagaaaatggctgacctggcgcgcatggaggccgtgctgtctgagttggtgtgcgcctgccatgcgcgaagggggaacgtttcctgcccgctgatcgcgtcactacagggtggagcaagcttggcaggttcggctatgccttag

SEQ ID NO: 187 - DNA, 366 bp, artificial
  Centroid sequence
atgaacgcctacacggtgtcccggctggctcttgatgccggggtgagcgtgcatatcgtgcgcgactacctgctgcgcggattgctgcgcccggtggcgtgcacaccaggcggctacggcttgttcgatgacgccgccttgcaacggctgtgcttcgtgcgggcggccttcgaggcgggcatcggcctcgacgcgctggcgcggctgtgccgggcgctggatgcggcggacggcgacgaagcggccgcgcagcttgccctgctgcgtcagttcgtcgagcgtcggcgcgaagcgttggccgatctggaagtgcagttggccaccctgccgaccgagccggcacagcacgcggagagtctgccatga

SEQ ID NO: 188 - DNA, 240 bp, artificial
  Centroid sequence
gtggccgactccttccgcgctggctggaacggcacagaagccggcagcgacggtgctggccccggccagaccgcagacggcaccgcaggctcgcagaagcaagagcaaccggcctgggccaagcggatgcaccgccgccagcaggctacccatgccgcgaccactgccgcccacacgctgcgcggcggcgacggcggcggctccgggcaaggcccgagcctgcgggattccgatacctaa

SEQ ID NO: 189 - DNA, 1014 bp, artificial
  Centroid sequence
atgtggctgattggacgtctgaggccggacttcaagaccatcgccaattttcgcaaggacaacggcaagaccatccacggcgtctgccgacagttcgtggggctgtgtcagcaactcggtttgttcgccgaagcgctggtggccatcgtcggcagcaagttcaaggcggtcaacaatcgcgaccgcaacttcaccagcgccaagctgcgccggcggatggaagagatcgagtccagcatcagccgctacctctctgcgctggacactgccgaccggcaagagcctgccgttgccctggtcaaagccgaacgcctccgcgacaagattgagaccttgaaagccaagatgcaggagctcaaggaagtcgaggttcagctcaacgaagcaccggataaacagctctccctgaccgatcccgatggccgctcaatgaagacccgtggcagcggaatggtcggctacaacgtgcaggcagcggtcgacgcgaagcaccacctgatcgtgactcacgaggtcgcgaacgacggtgttgatcgcgaccaactaggttcgatggccaagcaagcgcgagcagccatgggtgtcgaggtactctcggcggtcgcagacagagggtatttcaagggcgaagaaatcctggcgtgccaggaagctggaatcactgttttcgtacccaagacactgacttcgggggcgacagcagcgggccgctttggcaaaggtgatttcatctatgacgcagccaagaacgagtaccgatgccctgctgggcaaagtctgacttggcgcttctcaagcatcgagaaagggctgaagctgcaccgctactggagctcgcattgccaaggttgtgcgttgaaggagcgctgcacaccgagcccagagcgccgggtgagtcgctgggaacatgagacggtgctcgaggatatgcagccccgcttggatcaggcgccggagatgatgcgcatccgccgtcagacggtggagcatccatttggcacgctgaaggcctag

SEQ ID NO: 190 - DNA, 366 bp, artificial
  Centroid sequence
atgaacgcctacacagtgtcccgactggcccttgaggccggggtgagcgtgcatatcgtgcgcgactacctgctgcgcggattgctgcggccagtcgcctgcaccacgggcggctacggcttgttcgatgacgccgccttgcagcggctgtgctttgtgcgggccgcttttgaggcgggcatcggcctggacgcattggcgcggttgtgccgggcgctggatgcggcggactgcgatgaaacagccgcacagcttgccgtgctgagtcagttcgtcgaacgccgacgcgaagcgttggccgatctggaagtgcagttggccgcgatgccgaccgcgccggcccagcaagcggagagtctgccatga

SEQ ID NO: 191 - DNA, 2664 bp, artificial
  Centroid sequence
atgcacgagcaatatcagccactcgagatcgaaacccaggcccagaactactggaaagaacaccagtccttcctcgtcagggagctacccgacaaggagaagttctactgcctgtcgatgttcccgtatccgagcggcaagctgcacatgggccacgtgcgcaactacaccatcggcgatgtgatcagccgctaccaccgcatgcagggccgcaacgtgctgcagccgatgggctgggacgcgttcggcatgccggcggaaaacgccgcgatgaagaacaacgtcgccccggcggcctggacctacgacaacatcgcctacatgaagtcgcagttggacagcctcggcctggcgatcgactggagccgcgaggtcaccacctgcaagccggactactaccgctgggagcagtggctgttcacccgcctgttcgaaaaaggggtgatctaccgcaagaacggcacggtcaactgggatccggtcgaccagaccgtactcgccaacgagcaggtgatcgacggacgcggctggcgctccggcgcgctgatcgagaagcgcgagatcccgatgtactacttcaagatcaccgcctacgccgaggaactgctggagagcctcgacaacctgcccggctggccggagcaggtgaagaccatgcagcgcaactggatcggcaagtcgcgcgggatggagatcggcttcccctacgaccaggcctccatcggccacgccggccaactgaaggtgttcaccacccgtccggacaccctgatgggcgccacctacgtcgccgtcgccgccgaacacccgctggccacccaggccgcgcagaacgacccgcagttgcaggcgttcatcgacgaatgcaagcgcggcggcgtcgccgaggccgacatcgccacccaggagaagaaaggcatggccacttccctgttcgtcgaacacccgctgaccggcgacaagctgccggtatgggtcgccaactacgtgctgatgaactacggcgaaggcgcggtaatggcggtgcccggccatgacgagcgcgacttcgagttcgccaacaagtttggactcccgatcaagcaggtttatcagcacaagcgcatctatacagaagcgctacgcaaagagtttccgcgagaaatttatgagtacgaatacttcgatgacaagctatggaaggaatggtacggggccaaagacaccggactagttattaattccggtgagtacgatggtctctccttcgaagaagccttcgacgccatcggcgccgacctcgaggccaagggcctgggccaggcgcgcacccagttccgcctgcgcgactggggcatcagccgccagcgctactggggctgcccgatcccgatcatccactgcgaggcttgcggcgacgtcccggtgccggccgaccagttgccggtggtgctgccggaagacgtggtaccggacggctccggttcgccgctggcgaagatgccggaattctacgaatgcagctgcccgaaatgcggccagccggccaagcgcgaaaccgacaccatggacaccttcgtcgagtcgtcctggtatttcgcccgctacgcctgcccgcagttcgaaggcggcatgctggacaagaaggcggccgactactggctgccggtcgaccagtacatcggcggcatcgagcacgccatcctgcacctgctctatgcgcgcttcttccacaagctgatgcgcgacgagggcctggtcggcagcgacgagccgttcaagaacctgctgacccagggcatggtggtcgccgatacctactaccggaccaccgccaacggcggcaaggactggttcaacccggccgacgtcgaggtcgagcgtgacgccaaggccaaggtcgtcggcgcgcgcctgaagagcgacggtcagccggtcgagatcggcggcaccgagaagatgtcgaagtcgaagaacaacggcgtcgacccgcaatcgatgatcgaccagtacggtgccgatacctgccgcctgttcatgatgttcgcctcgccgccggacatgagcctggagtggtcggacgccggcgtcgagggcgccaaccgcttcctccgccgcgtctggcgcctggctcacgcccatgtcagcgccggcctccccggcgcgctggacgtcgccgccctgaacgacgcgcagaagcaggtccgccgcgccatccacctggcgatcaggcaggccagccaggatgtcggccagcaccacaagttcaacaccgccatcgccgcggtgatgaccctgatgaacgtgctggagaaggcgccgaaccaggacgcccaggaccgcgccctgatccaggaaggcctggaaaccgtggtcctgctgctggcgcccatcactccgcacatctgccacgtgctctggggccagctcggccatgccgaagcggtgatcgatgcgcgctggccgagcgtcgacgagagcgcactggtgcaggacaccctgcaactggtggtgcaggtcaacggcaagctgcgcgggcacatcgacgtggccgccagcgccagccgcgaggatgtcgaggccgccgcgcgcgccaacgagaacgtgctgcgtttcaccgaaggcctgagcatccgcaaggtcatcgtggtaccgggcaaactggtcaacatcgtcgccaactga

SEQ ID NO: 192 - DNA, 1449 bp, artificial
  Centroid sequence
atggaagagaagacccgcctgaccactgccgctggcgcaccggtggtcgataaccagaacgtgcagaccgccggtccgcgtggcccgatgttgttgcaggacgtgtggttcctcgagaagctcgcccacttcgatcgcgaagtgatccccgagcgacgcatgcatgcgaaaggctccgcggcctacggcaccttcaccgtcacccatgacatcaccccctacacccgggcgaagatcttctcccaggtcggcaagaagaccgatatgttcctgcgcttctccaccgtcgccggtgagcgtggcgcggcggatgccgagcgagacatccgcggcttctccatgcgtttctacaccgagcagggcaactgggacctggtcggcaacaacaccccggtgttctatctgcgcgacccgctcaagttccccgatctcaaccacgtggtgaagcgtgacccgcgcaccaacctgcgcaatgcgaccttcaagtgggactttttctctcacctccccgagtcgctgcatcagttgaccatcgacttcagcgaccgcggtctgccgaagagctatcggcacatccatggtttcggcagccataccttcagcttcatcaatgcgaacaacgagcgcttctgggtcaagttccacttcaagacccaacagggcatcgagaacctgaccaatgccgaggctgccgaagtgatcgcccaggaccgcgagagttcgcagcgcgacttgtacgagagcatcgagaaaggcgacttcccgcgctggaagatgtacgtgcagatcatgcccgagaaggaagcggccacctatcgctacaacccgttcgacctgaccaaggtctggccccacggcgactacccgttgatcgaagtgggcttcttcgagctgaaccgtaacccggacaactacttcgccgaggtcgagcaggccgctttcacgccggccaacgtggtgcccggtatcggtttctcgccggacaagatgctccagggccgtctgttctcctacggcgacgcccatcgctatcgcctgggcgtcaaccaccaccagatcccggtgaacgccgcgcgttgcccgcaccaggtctaccaccgcgacggcggcatgcgggtggacggcaacaacgcccatcagcgcgtcacctacgagccgaacagcttcaaccagtggcaggagcagcctgacttctccgagccgccgctgagcctggagggcgcggcggaccactggaaccaccgggtggacgacgactactacagccagcccgccgcgctgttccatctgttcaccgacgagcagaagcagcggctgttcgccaacatcgccgaagacatccgcgatgtaccggaacagatccagcgtcgccagatcggcctgttcctcaaggtcgacccggcctacggcaaaggcgtcgccgacgccctcggcctgaagctggactga

SEQ ID NO: 193 - DNA, 948 bp, artificial
  Centroid sequence
ttggttgccctgatccagccgcactacccgaagggtgaaggcggtcgcccagcttacccgttgatggcgatgctgcacgtgcacctgatacagaactggttcagctacagcgatccgacgatggaggaagccctgtatgagacaaccatcttgcgccagttcaccggcttgagcctggagcgcattccgaacgaaaccaccatcctcaacttccgccggctgctggagcagcacgagttgacggctggagttctggcgatgatcaatggctatctgggggatcgtggcttgtcgctgcgggagggcgccattgtcgatgccacgctgatccatacgccgagttcagccaagaacaaggatggcaagctcgatccagaaatgcaccagaccaagaagggtaaccagtactacttcggcatgaaggcgcatatcggtgtggatgacgcgtctggtggtgcacagcgtagtgggtacggcgggcaacgttgtggacgttactccggccgacaaattgctgcacggcgacggaacgtagtttgtacggatgcgggctacggggttgaaaagcgtccagagcatgcagttcgcggctacccacaggcgacccgcacggaccaaggccccgtattcaccggcaaggcgcttgatcagtgtgcgtatcagcgcgacatcaagctgaagctgattcagcctggcaagcccacgcagaatgccttcatcgagtcatttaacggcaagttctgggacgaatgcctcaatgagcactggttctactcgcaggccgaagcgagagtccagatcacggcctgccggtgggattacaacgagcaccgaccgcacagcaccattggcaatctcaccccggcagaatttgctgcaagttggcgaactcaccagcagcaactgaagcaggaaaaattgatctcaaccccagagcctactaactag

SEQ ID NO: 194 - DNA, 12297 bp, artificial
  Centroid sequence
ttgcagcgttcgaaggcccaacttgaacaacacagcgccgccattacagcccagcaggccgccccaggcagtcggacgccaggcggcgctggaacctccccgcaggatgttccggacggggctgggcgagggcagtctcaaggtcgacgcctcgctgccgttcgagcaggcctggcagaacgccaaggagaccggtgcagacccagggccggcggcaagaccacggtgagcatcgagcagaccgccgacaaggcggtgctcaactgggagaccttcaacgtcggccgcaacaccaccgtggacttccagcagcacgccgactgggcgttgctcaaccgggtcaacgaccccagcgcgcggcccagccagatccaggggcagatcaaggccgacggcacggtgatgctggtcaaccgcaacggcgtggtgttttccggcagcagccaggtggacgtgcgcaacctgacggtggcggcggcgaacatctcggacgaacagttccgtcagcgtggcctctactacgacaacgccggcagccgtccgaccttcaccgacgcggccggtgccgtgcgcgtggagcggggcgcacagttgcgcacggcagcaccgtccggctcgaccaagggcggcggctacgtcctgttgctcggcagcgaggtggacaacgccggcagcatcgtcacgccgaaggggcagacggtcctgtccgccggcgacagcttcgtcatccgccgtggccagggcaccgacggcaacctgacctccaccacccgcggcaacgaggtgctgccgggcttcgccgccgacagcagtgccggccgggtgcgcaacagcggcctggtgcaggccgccaccggcgatatcagcctcagcggccgcgaggtggagcaggccggcgtattgctttccagcagttcggtggacagccgcggcaccctgcacctgaaggccagcgagcggatcaccctggccgaaggcgccaccagcgcgatcctggtggacagcagcggcagcgccgccctcgatagccagcgcgaggccttgctcaagccgttgaacggctccagtgccgccgtcagccggggcgacgacgaccgccgcgacctgtcgcgggtggagatcgactccgccggcagcgtcgatttccgcgacggctccatcaccctcgccagcggcggccaggtggcggtcaacgctggccagcgcgccctgctgcgcgacggcgcggtgatcgatgtctccggcgcgcaaggcgtgcaagtggcgatggagaccaacaacatcaaggtcaacgtgcgcggcaacgagcagcgcgacgcctcggtcaaccgcgagggcggcggtctgaacagccaggacgtgtgggtcgacgtgcgcgacttggtacgggtgcctgccggcaccaacggctatgccagtgaccgctggtacaccgccggcggcctgctggaggtcggtggctacctgggcacccagggccactcggcgggcgagtggatggcccagggcggcatcgtcagtttcaccggcaacgacgtggtgacccaggccggttcgcagatcaacctgtccagcggaaccctcgatgtgcagggcggctacatccgccagacctggctgaagggctcggacggacgcctctacgaactcgggtcggcgccgggcgacctgctctacgacggcatctaccgcggctacgaggcacacagcgagcgctgggaccagacccgttatttctacaatccgctgatcgcgccgacccagcgctacgagaacggctacatcgtcggccgcgacgccggcagtctggtgatcggcagcgccaatgcgcggctcgacggccaggtggtcggcgatacctatcgcggcgagcggcagaccgaagcgccacaggccggcctggacggctacaaccagtcgcagaatgccgtggcgcgcggcgcacagctggtcgtcgggcgctacaccccctactacgtgaagagcagcggcctgctggagtacgctctcggcgccgatgccggcagcctcaagcaggtggtcatcggtgccggcgaggcggcggccgaggagccgaccctggacgctccggtggccgccgagcgccagggccgcctgagcctggacagcgaactgctcaacggcttccagctgggcggcctgaaggtggcggccggcgagagcatccgagtcgacggcgcgctgaccctggccaatggcggcgaggcaatcctgttcgccaacgacgtggcgatcgacgccgacatcaccgcccatggcggcagcctgcaggccggcaacgtgttggcgcagatttccccgaacgggacgatcgatggtttcgtcgattccggccgcgaagacggcatcttgcgcgtgggcgacggcgtacggctggatgccagcggcttgtggagcaacctgctgctggcgccggaggacaacgatacgttggcctaccgcgacggcggacggatttccctgcgcagcggcggcgacctgagcctgggacagggcagtctgctcgacgtgtcgtccggggcggcgctgctggccgacggcaaacgactgggcggacgcggcggcgacatcgccttgcacgccagtgccgggctggcgcaggccagcgatggccaattgcagttgggcggcacattgaatggtctcggcacgagtggcgccggcacgctgtcgctgcagagcggcaaggtgcggatcggcggcgacgacctcggggatggcagcctgcaactggccgaagatttcttccagcagggcttcgccagctaccgggtggtcggtcgctccggattgacggtagccgaggatgcccaggtgcgggtcgcgcggccggtctaccgtttcgccagcggggccggcgaggtcgcggctggcgaggcgccgcgagaggcgctggaggcctggacaccgccgctgtacctggaggatgccttggccggacgcttgatccaacgcgaaggggcggacctgtacctgcaggcaggcggcgacggcaatatcctcgggcagctcgatcccgccagccagacgctggagctggggcgcggttcgctggtcgaggtcgatccggggcgcgccatcgtcctgcgcggtcccggacagatcaccttggatggcactctgaacgcttggggcggacgcatcgacgtgcgccagcagcagttcggcgcgctcgacgttacccaggacaatcagcccaaggcccaaggccagccccatgcacgctccatctggattggagagcaggcattgctggatgttgccggccgcgctgtcactgccgtggatgggcgcggtcgccgctatggagaagtacagtccggcggcagcatcgtcatcggcggcgagatcgatccgggcaaggcgatcgcgacctcggcggatgcgttcgtcatcgtacgccccggtgcacgactggaggcctccggcagccaggcacagctggatgtaccgggactgggaagggttttgctgaccggcgacggcgggcgcatcgctctcagttcctacaatgggctgtatcttgacggctcgttgcgcgccgcagccggcggctcgggagcggcgggcggcagcctggagatcattgcggacgctcccctgtaccaaggttttactgtcgtggatgaccgggtattggccatgcgcgagctgatcctgacggcagggcatgccgattcgggattaccgaccttgctgcaaccgggaatggacgattcggctctgcgctatggccagagccgagttgggacgcagtcgctgacgggcggcggattcgaccaactttcgttgttcagcaacggtccgctgtcgttcgaggggaacatcgatcttgcgatggggcgcagcctgaatctgtacgcggggacgatagccgccacaggtggcgggccgagcgaggtgaagttgcaggcgccctatgtccgcctttccggcatcgggatgtatgggcagcaggcctctggcgagtttcgtccgcgtctcacgtacgggccgaccgcgacagcggagcaggttcgcttgcaggtttctgccgggcgcctgctggatatcgccgggcgcttgtcattcggtagcgacggggtgatcaatggggtcaacgcagaggctgtccgctatcagcgaccaggtttcgagaaggtaacgctgcgcagcgagggcgacctgcgtttcgctggcgactatccagagaatggcgatccgtcggggcgcttgataacccacggcgatctgcaactgactgcggcccaactctatccggtgacgggagcgagttcgaccctctatgccgggtatggactggatgagagggggcaggccgtcttcgatgccgaacggcatttggctatcgaacgtagcggcgagtccttgccggacactccgctgtcggtattcggcagtctggcgttcatggcatcgaatatcgagcagggtggcgtggtgcgtgcgccgctggggctcatccagttcggcagcaatctggatcgtgccccgggcacggtaaggttgttgccgggtagcctgacctcggttagcggcgctgagctggtcatgccctatggaggcacgaccgatgggatcaactatctggtcaaccaggtccccattcaactgaccggtgccgggggcgctctcgctgctgggacactggttgcgggagtcggcctttatgccagcgaggtcgatgtgcaacagggggcgcggctggacctgtccggcggcggcgaactcgcgggggctggattcatctccggcagagggggttcgaccgatgcgcgttttcatcccctggtgcagcaggacaatgatgggttccgtctgccggagctgtccagcaacccggtgtatgccatcgtgcctggacaccaggccgttagtgcgccattgggcggcgaggcgggcgccatccagccgttggtcgggcaacaggtcaccatcggggatggcgttcccggcctggccgccggtacctacaccttgctgccttcgacctatgccctgttgccgggcgctttccgcgtcgagatcaacggtctggcggggcaaggcgcgcccatggcgacgcaggggttgcgcaatggctcctgggcgacgtccgggcagttgtcgattgccggcacgtccatccgcgacagtctgagccgtcaggtcatcctgtcttccgccgatacgctgcgccgctactcgcagtacaacgaaatgagctatgcggatttcattcgcgccgatgccgcgcgcaagaacatccccagagcgatgttgccagtggatgccagatccctctacctgggattgcgcgcggatgaggagcttcgggaaaacgccctgagcttcgaggggaaggtcgacttcacgccggaagaaagcggatatggcggcagcctcatcgtggatgccgaggcgggcatcgagattctgcctgaaggtgggctgcccgactccgatttcgctggcgtgtcgttggttgcggacgatctgaatgcaataggcgccagccgtatcgccattggcacgctgccctacgtcgaatacggcgagcaaggaaacttcgtccagttcggcgggagcaaccggctctttcccgttgtgctgcgaaagggcgcgcacctttccgcaccggaggtgatcattggcagggatatcacccttgaaggcgggagtggcatcagcactctggggaaaggcaagactgcatacgattcgtccgatggtttcatctatcaacccggcggccgtaacctgctgctcttgtccaacggatggctgaacctgctggcacccgcagcggatagctcgttaccggttcgtctcggaggttgtgcggaaggggcgggctgcgccgacaccgaactctattcggagggcactctgggtatcgccaccaatggtacggtgacgtttggcgacaacgttcgttacgggacacgcaatctcagcctggcgctgagtacgatcaatatcggctccagccagtcgctggccgacgcggccgctcgcggcgtgttgccgaacggcctggcgctggaccagacggtgctccagcgcctgctgcgcggcgagcgcggggcgggtattccggccctggaaaacctgatcctcagtgcccgcgatgcggtcaacatatacggtagcgtcagcctcgacacctacgacccggccaccggcaaatccagcctggccaacctggtgctgggcaccccggccatctacggccatggcaccggcgaggatgtcgccagcattcgcaccgccagcctggtctggagcggctccagccagccggccgcggcaccggtcgccggcggcgccggtagcggtagcggaaccctgcgggtggatgccgagcgcatcaccctgggctacggcgcgaatacccagccggccggcgagaccgacgaggcacgcctggcgctgggcttcgccgaggtgcaactgaacgccagcgagcggatcagcgccaaccacaagggcagcttgcggatctaccagcgcctggacggctacgtcgccggcgaaggcctgcgctacagtggcggcgacctgcgcctgagcacgccgttgctgaccggcgaggccggctcgctgagtcggatcagcagcggcggtagcctcagcctggcggcgccggcgggcgctgccgcggtgaccttcgacagcggcaccgccgggcttggtgccgagttgtccctcagcgcccgcgagatccgcctggatagcgcggtctcgctacccagcggcaagctgagcctgagcgccgaagacgacctggagctgggcgatggcgcgcgcatcgacctggccggacgcaaggccagcttcaacgatgtggataaatacagctggggtggcgacctgctgctgagcagtcgcgccggcgacatccgccaggccgccggttcgctgatcgacctgtcggcgcgcaacaaccgcggcggtaccctgagcgccgtggcgttggccgaggacgccggggtggtggacctgcagggccgcatactgggtggcgccagcggcgactacgatgccggtggcacccgcgtgccgttcctcggtggcgagctggagatccgcgcccagcgcctgggcgacggcggcagcctgagcgagcagttcaccgccttgaaccagcgcctgaaccagggcgaggtcttcggcgcccggcgcttccagctcaagcaaggcgacctgcagatcggcgacggcctgaaggcgcatcgcatcgaggtgtccctcgacaatggccagctcggcgtgagcggaacggtggacgccagcggcgcgcaggtcggcgagatccgcctggccggcggccgcggcctgagcctgggtggcaacgcgctgctggatgcgcatggaagcctgctgcggcgcgacagctacgggcagatcatcgacagcccgaaccgggcgatggtcgagctgagttccggcagcggcaccttggtcctggccggcggcgcgcgcatcgacctgcgccatggcaccgcggcgccagcggaacaggttgatggcgtcgcccgtggcacgttggagttgaacgcgccacgcctgggcggagtcagcgccggcgacatcgccatcgatgccagcggcgcgctggatatccgcggcgccggcagcatcgccctgaacgcgatgcagcgttacgacgatgcgccctggggcaacgatccggcggccggcgggcggtcctaccaggtgatcgaccaggcttacctcgatgcgcggcatgccgagagcagcgcgttcatcgccgcggcgctggccaaccgcgagttgctcgacggcaagctggccggactgaccaatgccacctacgcggatgctttccacctgcgtccaggggtggagatcgtcagcgcaacggcggacggcgatctggtggtgcagggcgatctcgatctgtccggctaccgctacgccagcctcaatccgaacacgccgctgaccgaggtctacggttccggcgaggtcggcgcgctggtgctacgcgccggcggtgacctgaacctctacggcagtatcaacgacggcttcgcgccgccgccggactcgccggacgacaagggctggatcctcaccccgggagtgcagccgttcggtggcgacctggtggttcccggcccgggcgtggtgctcggcgacggtaccgcgttcctcggcggccgcaccctcaactacgacctgccgatcaagggcaccaccctggccgccggcacccgtctggccaccgaggcggtactcgaacagccctataccctggccgccggcagcgtgctggtagcggacatccacgatgccgccggcaacctgctgtacgtcgcgggcagcctgctgcgcgacggggtgacgctggaggtcggcagccggctgggtgccggtaccctgctggcggcaccggccagcgtgcaggcgatgatctggcctgcgggcgtgcccttgccgagcatcctgcgcgaggggcccagcagacccaatgtcctgctgctcaatggagagctggccttggcacgtggttctctgatcccttcgcagaccgaggtggtactggctggcgatgcgcctttcatcgagttgcggcccagcgacggtgtccgccagggacgcaactgggcattggccgagatgctgccggccggtagccagtcctggtccatgcgcctggtcgccggtgccgatctcgcggctgccgacaaccgtctggtgcgtccggactcctcggccagcctgaacctggccgatacgcactatcaggcgaagatcgaacagagctcgggagggctggtgttcaccgatcaggctaccgactgggggatcaccccgggaactccggtcgacgagagcaatgaatggatctgcgggctggggccgtattgtgccgagcctccccgctggacctgggcgcccggcaattacctgggcatgcctgctggtacggcgatcggcgagggcgatctgtggtggtgcagtgtcgatccgtccctatgtatcgagaatctcggcaaaaccgtggtcacaccgcagaaccagttgttcagtgtgctgcgcaccggcactggcgatcttgacctggccagtgccggtaaccttacgcaatggtcgccgtacggcgtctataccgccggaacgcaggccgccgatgtcgcgacgggattcaatcagcctcgcggtctgttcaatgggtcggtactgggcgccggtggcgcggattacgaagtgctctcaaccagccagtaccaggcctggtatccggaacatggcggcaacctcgatatcgccgttggcggtgatgtggttggcgatcaatgggccgagaaactgacaagtagcgatcccattcgccccttgccccccagcgctgcagtcggcaactggctctggcgccagggcagcgctgatagggaaggagtgccgacggcctggtgggtcaatttcggcagctatgtgcgtggcgcggagggagatgctccctatctggtcggcttcaccggtttcggcactctgggaggcggcaatctcagcatgcgaaccggaggtgatgccggcaatatcgcgccacgcggagatggctcgataccttcgtccggtaaccttaatccgcgcagccagggactggtcttggcggttgccggcactggccggctcacctccgacggcgcgctgcaacttggcggcggcggtgacctgaatgtgagaattggcggggaggtgaacccgagccgggaggcgcgggctacccagacctactcgagttcggggtttgacggtctttacagcggcggcaccattcacgatctgcagggggccctcatcaatctgcgcggttccgcgagcttgtacagtggtgcgctgggaggcatcgatcctcgctacgacactctactgcgggaccccgccgaagtgcgcagcagggatgcgttcagcccgacgctggctagctccacgggcggcctcaccctggtggccggagatactggcatgcgtctggaaacccgtggcgacctggtcctgggcggggtgactgatcccggtagggtgggggtgccgaataccgttggcttcacggctcccgatggcagcgtctaccaagggggcgggatcggttggttcagtctctggactgcacacacctcgatcgatctgtttgcggcgggcggcaacctgacgcccagcacccaattggtcgaggcaaccaacgctattcccatggcaggccgaaacctgtcgcctagcgatgggcgattcatctatccatcgatagtacgtgcggcggccccggaaggaagtatctatctcggtccttccagcggttacatgggaggcgtgagcctgaatgtctcgaccactccctactccttgttactggcaccgtcactcaacggtgaactggagttgctggctggagactccatttatgccggtggctattcggtgcaacgctcaggtgccgatcctgcgaacctgccatcgatctggacgccggcatttgccggctactccgatgccgcgctgctcaacccgatagccggcaacggcagtccggacgggaatccggccgtcattggcggattgcctctgttctacttcggccccgatagcgctgcgagcctggcgcgcgatctgcaaccggcgcgtttctatgcgttgacaggagatatcgtcgggctcaatagcggtgcgcagattcgtttcggcgagcaggcggggaaccgcgccgggcaaacctggtatgaaggtgcgggtcccgtctggatgcgcgccgggcgcgacatcgttgcctccggaaccccattgggacagcgtatcagcgctcccagtcagatcagtacggatgcctcgttcaccggcaacctcttcgtccacgacgaccccaacgacctctcgctggtccaggccggccgcgacatcctctacggcaacttcaacgtcgccggccccggtaccctggagatcagcgccgggcgcaacattctcatggaggatcgcgcggcgatcaccagtctcggcgcggtggtgccgggcgacagccggccgggtgccgatatcgtgctccaggccggcgcggcgggggccgactatcaggccttcctcgagcgctacctggatccggccaacctggcgcagggcggcaccccgctggccgagcagccgggcaaggtggtcaggacttacgaaagcgagttggccaagtggttgaacgagcgcttcggcttcgccggcgacgcggaacaggcccaggcgttcttcgccggcctgcccgccgagcagcagcggattttcgcccgccaggtgtacttcgccgaactcagggccggcggccgcgagtacaacgaagtcggcggggtacgccagggtagctacctgcgcgggcgcaacgcgatcgccgcgctgttccccgagcgcgatccggcgggcaatccgatcagctacgaaggcgatatcgtcatgtatggcggtgccggcgtgcacaccgacttcggcggcgacatccagttgctcagccccggcgggcgccaggtgttcggtatcgagggcgaggcgccgccgtccaccgcaggcatcgtcacccagggccagggcgatatccaggcctattcgcgggacagcatcctgctcggccagagccgcatcatgaccaccttcggcggcagcatattggcctggtcggcggaaggcgacatcaacgccggtcgcggttcccagaccaccgtggtgtacaccccgccgcggcgcatctacgacgcctggggcaacgtcagcctgtcgccgcaggtgcccagcaccggcgccggtatcgccaccctcaacccgattcccgaagtggcaccgggcgacatcgacctgatcgccccgctcggcaccatcgatgccggcgaggcgggcatccgggtttccggcaacgtcaacgtggcggcgctgcaggtggtcaacgcggcgaacatccagacccagggccagtccagcggcattccgctggtggcttcggtgaataccggggcgttgacctccgccagcgccgcggcgagttccgcgacccaggcggcggaggacgtcagtcgccagcagcaggccgccgcgcggcagcgcatgccgtcggtgatcacggtgcaggtgctcgggttcggcaacgagcgcctggagccttcgcgcgacggcgccagtcgttcgccgggctacaacccggacagcgccgtgcaggtgcttggcgccggagccctcggcgaacaggcgcgcagtcaattgaccgatgaagagcgcggcaacctgatcctgtag

SEQ ID NO: 195 - DNA, 846 bp, artificial
  Centroid sequence
atggatcgtttgtctaatttgctctcgcggttcggcgtgcgggccaatctgttctatgacggcgacctatgcggctctgcatcttacgatggcgccgagcggcgaggttatatccatctgcttcaggccggcagcgtgacgttgcttggtcccgatcgcaaggatttgcagctcactcgccctagcttgatttttatgccacgccccgccaagcatcaattgtttgcgggtgagtccgatggcgcaaagttgttgtgtgcttccatggagtttgagggcggaattgataatcctttgtcggcttcattaccggactgtttggtgctcgcactcgatgatctgcccatgctggcagacacgttggagtggatgtttgccgaggcggcaaatgtgcattgtggaagggaagccgcgcttgagcgcttatttgagctcctaatcattctgttgctccgttacctgctcgatcatcaccagttgcgcaccggaatgatggctggactggccgacatgcggcttgcccgatcgcttttacagatgcacaactccccggaacatgcctggtcaatagcagagctggccagtgagtcaaatatgtcacgcgctgcgtatgccgtgcatttcaagagtgtcatcggacagacgcctgctgattatttgttgagttggcgagttagcctggctcagaagctgatgcgagaagggcgctcgattacgctgattgcagctcaagtcggctacgaaagtccttcggcgctgtctcgcgcatttagacgcaagacggggttgagccctcgtgactggttgaaagatctggcgggggaaaatgatggcaaaaaggcctaa

SEQ ID NO: 196 - DNA, 612 bp, artificial
  Centroid sequence
atgaccgccccaaccaccaccgccaacgcgcctgccgttgcgccacgtcctcgctcgcacccgcgttcacgtttgcgcgctcgcatcgtcgtggcgacactggccgccatcggcttcgctgcgctggcctgggcggctttcgtgtcgccgctgccgcgtctgacctacaacccgtccgacagcgtggcggtcggctggtatcgcatcgacccgttcaacccgcgcaccgcctcgctgccacgtccgttgtccgtggacagcatcgtgctggtgccgcttccggccacggccgccgggctcgctgcgcagcgcggctacctgccgacgcgcgttccgctgctcaaacgtgtgggcgcggtcgcgccgcaacacgtctgcatcgtcgccggtcaggtacgcatcgacggcgtgccttcggccaccgtgctgcctgccgaccggctgggccgggagctgccatccttacagctttgccgccgccttgaaccgggcgaactgttcctgttgagcgtgacgaatccggcatcgttcgacagccgctatttcggcccggtgagcacatccgccgtgatcggcgttgcgcatccggtgtggctggtgacacgcccatga

SEQ ID NO: 197 - DNA, 1686 bp, artificial
  Centroid sequence
atgacccatctaaaaatcaccggcatgacctgcgactcgtgcgcggcgcacgtcaaggaagcgctggaaaaagtacccggcgtccaatctgccatagtgtcctatgccaagggcgcggcccagctcgcccttgatccaggcacagcgccggacgcactgaccgccgccgtggctggcctgggctacaaagcgatgctcgccgatgccccgccgaccgacaaccgcactgggctgttcgacaaggtgcgcggctggatgggtgccgccgacaagggcagcggcggcgagcgcccgttgcaagtcgccgtgatcggcagcggtggagccgcgatggcggcagcactgaaggccgtcgagcaaggcgcgcaggtcacgctgattgagcgcggcaccatcggcggcacctgcgtcaacgtcggttgtgtgccgtccaagatcatgatccgcgccgcccacatcgcccatctgcgccgggaaagcccattcgacggcggcatgccacccacaccgccgacgatcttgcgcgagcggctgctggcccagcagcaggcccgtgtcgaagaactccgtcatgccaagtacgaaggcatcctggacggcaattcagccatcaccgttctgcacggtgaagcgcgtttcaaggacgaccagagccttatcgttagtttgaacgagggtggtgagcgcgtcgtgatgttcgaccgctgcctggtcgccacgggtgccagtccggccatgccgccgattccgggcctgaaagagtcaccctactggacttcgaccgaggccttggtcagcgacaccattcccgaacgcctggccgtcatcggctcgtcggtggtggcgctggaactggcgcaagccttcgcccggctgggtagccaggtcacgatccttgcgcgcagcacgctgttcttccgcgaagaccctgccatcggcgaggccgtcacagccgccttccgtgccgaaggaatcaaggtactggaacatacgcaagccagccaagtcgcccatgtggacggcgaattcgtgctgaccactggacagggcgaagtgcgcgccgacaagctgctggtcgccaccggccggacaccgaacacgcgcagcctggcattggaagcggcgggggtagccgtcaatgcgcagggggccatcgtcatcgacaagggcatgcgcaccagtagcccgaacatctacgcggccggcgactgcaccgaccagccgcagttcgtctatgtggcggcagcggccggcactcgtgcggccattaacatgaccggcggcgacgccgccatcaatctgaccgcgatgccggccgtggtgttcaccgacccgcaagtggcgaccgtgggctacagcgaggcggaagcgcaccacgatggcatcgaaaccgacagccgcacgctgacgctcgacaacgtgccgcgtgcgctcgccaacttcgatacccgcggcttcatcaagctggtcatcgaggaaggcagcggacggctgattggcgtacaggtggtggccccggaagcgggcgaactgatccagacggctgttctcgccattcgcaaccgcatgacggtgcaggaactagccgaccagttgttcccctacctaacgatggtcgagggcttgaagctcgcggcgcagaccttcagcaaggacgtgaagcaactgtcctgctgcgccggataa

SEQ ID NO: 198 - DNA, 1554 bp, artificial
  Centroid sequence
atgaaccatgttcttcgcccgagggcggcagatctgcgcctgggcctgggtgcttcgctgctgtccttcgcgctggtcgccggcgcccagccggctgcgaccatgaccgacgacaacggcgccacggtaggcgacaaccagaattcgcagaccgccggtcccgacggcccggtgctgttgcaggatggccatctgctgcagaagttgcagcgcttcgaccgcgagcggattccggagcgtgtggtgcatgcgcgcggcaccggcgcgcacggagagttcatcgccagtgaagacctttccgccctgacctccgcggcgctgttccgcaagggcgaggtgacgccggtgttcgtgcgcttctccacggtgatcggcggcagcgggtcgccggagacctcccgcgacccgcgcggcttctccaccaagttctatacccgcgaaggcaactgggacctggtgggcaaccacctgccggtgttcttcatccgcgatgcgatcaagttcccggatgtcatccattcgctcaagccgtcgcccaccaccaacctgccggatcccgagcgcaccttcgatttcttcgcccgggtaccggaagccacgcacatgctgacccggctgttctccgactacggtacgccggccagctaccgccacatggacggttccagcgtacatgcctacaagctggtcaacgcccggggcgaagtgcactacgtgcgtttcgactggcaaccgcaactgggcgtgaagaacctcagcgccaagcaggccagcgcgatccaggcgcgcgactcgaatcacgcgacccgcgacctggtcgaggcgatcaagcggggcgattatccgaagtgggacatgtacatccaggttctcgccccgcaacagctggacgacttcgccttcaatccgctggactcgaccaaggtctggaccggtgtggcgcggcgcaaggtcggcaccctggccctgaaccgcaatccggacaacgtgttccaggagaccgagcaggtcgccatggcgccttccaacctggtgccgggcatccagccctcggaggaccgcatgctccagggacggctgttctcctatgccgatacgcagatctaccggcttggcgccaacggcctggagttgccgatcaaccggccgcggcagatccgcgtggtcaacggcaaccagttcggcgccggcgacaacgggcacagcctgtcggacgtgaactaccagccgggacagcgcgagccctgggtcgaggatccacgctcgcgggccgtgccgacgccgctgagcggcaccgtgcagcaacggcgtatcgccaagaccctcaacttccagcaggccggcgagttctaccgcagcctgtcgcgcagcgaacggaagaacctgatcgccaatctttccgccgagcttggccaggtacgccaggccgaggtgcggcagaccatgctttcgtacttctacaaggccgatgccgactacggccaggcgctggcccgggcgctggacgaagatgcgacgcgcatcgctgcgctggcggcgaaactgcgcgagtag

SEQ ID NO: 199 - DNA, 2967 bp, artificial
  Centroid sequence
atgccgcgtcgcttgatcctctcggccacggagcggggcaccctgctcgcgttgccagaaagccaggatgacctgatccgctactacaccttcaacgactccgacctgtcgctgatccgtcagcggcgcggcgacgccaaccgcctcggcttcgccgtgcaactctgcctgctgcgctaccccggctatgcgttgggcactgacagcgagctgcccgaaccggtcatcctgtgggtggccaagcaagtccagaccgatccggcgagttggacgaagtacggcgagcgcgatgtgacccgtcgcgagcacgcccaggaactgcgcacctaccttcaactggccccgttcggcctgtccgacttccgcgccctggtgcgcgagctgaccgaactggcccagcagaccgacaagggcttgctgctggccggccaggcgctggagagcctgcggcagaagcgacgcatcctgccggcgttgagcgtgatcgaccgggcttgctcggaggccattgcacgggccaatcggcgggtctaccgcgccctggttgaaccgctcacggactcgcatcgggccaagctggacgagctgttgaagctcaaggccggcagcagcatcacctggttgacctggctgcgccaggcaccgctgaaacccaactctcggcacatgcttgagcacatcgagcggctgaagacatttcagctggtggacttgcccgaagtcctgggccggcacatccaccagaaccgcctgctcaagctggcccgcgagggtgggcagatgacgcccaaagacctcggcaagttcgagccgcagcggcgctatgcgaccctggccgccgtggtgctggagagcactgcaaccgtgattgatgagctggtggatctgcacgaccgcatcctagtcaagctgttcagcggcgcgaagcacaagcatcagcagcagttccagaagcagggcaaggcgatcaacgacaaggtgcgcctgtactccaagatcggccaggcgctgctggaggccaaggaagccggcagcgacccctatgccgccatcgaggcggtgatcccctgggacgagttcaccgagagcgtcagcgaagccgagctgctggcccggccggagggcttcgaccacctgcacctggtcggcgagaacttcgccaccctgcgccgctacacgccggctctgctggaggtattggagctgcgcgccgccccggccgcgcagggcgtgctggcagccgtgcagacgctgcgcgagatgaacgccgacaacctgcgcaaggtgccggccgatgctcccaccgccttcatcaagccgcgctggaagccactggtgatcaccccggaaggcctcgaccggcgcttctacgaaatctgcgccctgtccgagctgaagaacgccctgcgctccggcgacatctgggtcaagggctcgcggcagttccgcgacttcgacgactacctgttgccggccgagaagttcgccgcgctcaagcgggaacaggccctgccgctggcgatcaacccgaacagcgaccagtatctggaagagcgcttgcagctgctggacgagcagttggccactgtcgcccgcctggccaaggacaacgagctgcccgatgccatcctcaccgagtccgggttgaagatcaccccgctggatgcggcggtgccggatcgggcgcaggcgctgatcgaccagaccagtcagttactgccgcgcatcaagatcaccgaactgctgatggacgtggacgactggacgggcttcagccgccacttcacccacctgaaggacggggccgaggccaaagaccggacgttgctgctgtccgcgatcctcggtgatgcgatcaacctcgggctgaccaagatggccgagtcgagccccggtctgacctacgccaagctgtcctggctgcaagcctggcacatccgcgacgagacctattcggcggccctggccgagctggtcaaccaccagtaccagcatgccttcgccgcccactggggcgacggcaccacctcatcctccgatggccagcgtttccgggctggcggccggggcgagagcaccggacacgtcaacccgaagtacggcagtgagccgggacggctgttctacacccatatctccgaccagtacgcgccgttcagcacccgcgtggtgaatgtcggcgtgcgcgattccacctatgtgctcgacggcctgctgtaccacgagtccgacctgcggatcgaggagcactacaccgacacggccggcttcaccgatcacgtcttcgccctgatgcacctgctgggcttccgtttcgcgccgcgcatccgcgacctcggcgaaaccaagctgtacgtgccgcagggcgtgcagacctacccgacgctgcggccgctgatcggcggcaccctgaacatcaagcacgtccgcgcccattgggacgacatcctgcgcctggccagctcgatcaaacagggcaccgtcactgcctcgctgatgctgcgcaagctcggcagctatccgcgccagaacggcctggccgtggccctgcgcgagctgggccggatcgaacgcacgctgttcatcctagactggctgcaaagtgttgagctgcgccgccgcgtgcatgccggcctgaacaaaggtgaggcgcgcaactcgctggccagggcggtgttcttcaaccgccttggggaaatcagggatcggagcttcgagcagcagcgctaccgggccagcggcctcaacctggtgacggcggctatcgtgctgtggaacacggtgtacctggagcgcgccacccaggggttggtcgaggccggcaagccggtggacggcgagctgctgcaattcctgtcgccgctgggctgggagcacatcaacctcaccggcgattacgtctggcggcagagccgcagactggaagacgggaagtttcggcccctacggatgcccggaaaaccttag

SEQ ID NO: 200 - DNA, 1179 bp, artificial
  Centroid sequence
atgttcaagcgctctctgatcgctgcctcgctgagcgtggccgccctcgtatccgcccaggccatggccaccgtcaatggcggcggcgctaccctgccgcagcagctgtaccaggagcccggcgtcctgaccgccggcttcgccgcctacatcggcgtcggcagcggcaacggcaaggctgccttcctgaacaacgactacaccaagttcgtcgccggcaccaccgacaagaacgtgcactgggctggcagcgactccaagctgaacccgaccagcgaaaccagcccctacctggccgcccatggcgccgcctggggtccgctgatccaggttccctcggtcgccacctcggtcgccattccgttcaacaaggcaggcagcaacgccgtcaacttcgccgacgtgaacaccctctgcggcgtgttctccggccgcctgaccgactggagccagatccccgactcgggccgcaccggcgccatcaccgtggtctaccgttcggaaagcagcggtaccaccgagctgttcacccgcttcctcaacgcttcctgctccagcgccaccgagggcggtaccttcgccatcaccaccagcttcggcagcagcttctctggcggcctgccgtccggcgccgtctcggcccagggcagccaggccgtgatgaacacgctcaacgccgccgaaggccgcatcacctacatgagcccggacttcgccgcgccgaccctggccggtctcgacgatgccaccaaggtcgcccagattcgcggcgtatcgccggctccggccaacgtctcggccgccatcggcgccgttaccccgccgaccaccgcccaacgctccgatccgaacaactgggtgccggtcttcgccgccaccgccagcgcgaccgatccgagcgtacgtccgtaccccaccaccggctacccgatcctcggcttcaccaacctgatcttcagccagtgctacgcggacgccacccagacccagcaggtgcgcgacttcttcacccgtcactacggcgccagcgtcaacaacgacgccgcgatcaccaaccatcgcttcgtgccgctgcctgcttcctggaagctcgcggtgcgtcagtcgttcctgacttccaccaacaacctgtacatcggccacaccaacgtctgcaacggcattggccgtccgctctga

SEQ ID NO: 201 - DNA, 441 bp, artificial
  Centroid sequence
atgagcacacaattcatcggcgagggcaacatcggatcgcctcccgagtaccgcgaattccccaatggcaacgacgatcctcgccggttgctccggctgaacgtgtacttcgacaaccccgtccccaccaagggcggcgagttcgaggaccgcggcggcttctgggcgccggtggaactctggcaccacgacgccgaccgctggcagcagctctaccagaagggcatgcgggtgctggtcgtcggccgcatggagcgcgacccctggacggacaacgaagatcagccgcgtgagacttggcaggtcaacgcgcgcagtgtcggcatcctgccgtaccgcatcgagtctgtggccctcagcccgaagccacaggaggcagagccgaagccccaggccacccaggaatcgacggcgccgaaagagaccaagcgcaggaagtga

SEQ ID NO: 202 - DNA, 214 bp, artificial
  Centroid sequence
ctcggcttcggccgacgacggcggcccgcgccgtcagcccgaactctccgaaaccgtcgcctacgaccccgagctggccgcgcccgcggccgaccttgggctgctcgatgacgacgacgatttgccgcttccccttcctcgccagctcgatccagccatgcagcgcacggcccggctggcttccctcgaccccaacgacggaatcgagctatga

SEQ ID NO: 203 - DNA, 276 bp, artificial
  Centroid sequence
atgaagaaactgtttgcctccctcgccctcgccgccgttgttgcccccgtctgggccgccacccagaccgtcacgctgtccgtaccgggcatgacctgctccgcctgcccgatcactgtcaagaaggcgatttccaaggtcgaaggcgtcagcaaagttgacgtgactttcgagacacgccaagcggtcgtcaccttcgacgatgccaagaccagcgtgcagaagctgaccaaggcaaccgcagacgcgggctatccgtccagcgtcaagcagtga

SEQ ID NO: 204 - DNA, 876 bp, artificial
  Centroid sequence
atgcaggtcgtgtccatcatttcaacgaagggcggcgtcggcaagaccacgacggccgccaacctgggcgggctcgccgcggacgcgggcctgcgcgtgctgctgctcgatctcgacgtgcagcccaccttgtcctcctactacgaactgacccagcgcgcgccgggcggcatctatgagctgttggccttcaacgagcgcgaccttggccagctcgtgtcccgcacgatcatcgcgggcctggacctggtgctgtccgacgaccaccggggcgagctgaacacgttgttgctgcatgcgccggatggccgcctgcggttgcggcatctgctgccagcacttgctcccctctacgacctggtgctgatcgacacccagggcgcgcgttccgtgctgctggagatggcggtgctcgcctccgatctcgcgctgtcgcccgtcacgccggagatcctcgcggcacgcgagctgcggcgcggcaccatgcagttgctcgaagacattgcgccgtaccggcacctgggcatcgaaccgccgccgctgcacttgctcatcaaccgcgtccacccggtgtccgccaacgcacggctgatccagcaggccttgcgcgacctgttccaggacagcgccggcatccgcgtgctcgccaccgacgtgccggccatagaagcgtatccacgtgccgcaacgcgcggcctgccggtgcatcgggtcgagcaccgccagccgcccggcagagtcgcccctgccgcgctcgacacgatgcgcgcgctcgccagcgagttgttcccgcaatggcaggaccgactggctcaagtatccggccgcccgcagcgacctcttgatcctgggaggccccatggcgaacgcacatga

SEQ ID NO: 205 - DNA, 780 bp, artificial
  Centroid sequence
gtgctgctgctcgatctcgacgtgcagccgaccttgtcgtcctattacgagctggcacaccgcgctgccggcggtatctatgagttgctggcgttcaacgaacgcgccctcgatcagttggtgtcccgcaccatcatcgcgggcctggacctggtgctctcgaacgatcaccggggtgaactgaacacgttgctactgcacgcgccagacggacgcctgagactgcggcacctgctgccggcgctggcgccgctttatgacctggtgctgatcgacacccagggtgcacgctcggtgctgttggagatggcggtgctcgcctctgacctggcgctgtcgcccgtgaccccggaaattctcgctgcccgcgaactgcgacgcggcaccatgcagttgctggaggacatcgcgccataccggcacctcggcatcgaaccgccatccctgcacctgctcatcaatcgcgtccaccccgtgtccgcgaatgcacggatgatccagcaggcgctgcgcgacctgttccaggaccatgccggcatatgcgtgctgggcaccgacgtgccggccatcgaggcctatccgcgcgccgcaacccgcggcctgccggtgcatcgcgtcgagcatcgccagccgccgggcagagttgcgcccgccgcgctcgacaccatgcgcgcgctcgccggcgaactgttcccacagtggcaagacagatttgccctcgtgtccggccgtcctcctcgttccattgaaaccgggaggtcacatggcgaacgcacatga

SEQ ID NO: 206 - DNA, 825 bp, artificial
  Centroid sequence
atggatcgttccctcatcaaatccatgatgccttcgctggtcgcaggccatgtgccccgcaacgtgcggtcgttcaagtaccgcgtgttcgatgatcagccgctgtcctcaacgctgggcttcgccatcgacccccaacccttcgacggcaaggtggtcgccgcgaccgacgatgccatcgtcgtcaagctcaagccttccgagttcgcggtgctcgatcccagcctggtgaccacggttcctgccgaaggcgccaaggtgcatgtccaaccctatgcccgtcgtcgcttcgacggactgcgcgcggacacgccggaggtcatcaccgaggagacttcggacggcacgccgtacaccatcacgaggcacatcctcggctcggcgccggccaagctgcccattcccacgccgcagtgcatggagttgggccagctcatcgagcagttggaggagatgccggcccccgatcgcttccggcgcatcacccacatgctggtggatgccggtgcccgcgacttcacctgggtcgatcccacgccctccaagatcatcgagaccccgccggcgatcagcttcacggtctcgaccgcgaagttcgagggccgggtgacgatcctctacgaccgcggcggagacacctacgtggtggaactgcaccgtcagaacggtgaatcggtcgaactggtcgatcggcacgacgaggtgtatttcgacatgctcggcgaagtgctggagaggctcatcgacgacgggcgctggcgccagatcgacgtgagcatcctcgacgcgaaagcggcccgcaagcgccaggccgtcccggcatga

SEQ ID NO: 207 - DNA, 729 bp, artificial
  Centroid sequence
atgtcgctgacgcttcacacccaccacgcatcgcgcatctggcatggccgcgccgccgccgaggggcgacccggcatcgtcggcctgaacggctacatcgccgtgatgaacaagatgaagcgcggctcggaacaggatgacccgtacagcgactggtggatgttgcgcatcgaggaaaagctcgaccaggccaagaccacgttgcaatcgctgcgcgagcaggtggaccaggcattggccggcgtgccagcggcgttgagcctgggcgagaacctcaacgtgcaaccggtgaagctccccttgttcgtgaacgcgcagctcggctttgccgcggtctatctcctggccgactatgacgacatcgcccgcaagctgatcctcgcccatcacaccgcgctgatcgatcgctcgacattggagcggtggctcaacgaaggcgctcacacgctgcgcagcctgttcagcctggcccagcagtaccgctactcgggatgcacccgcgacgacttcgcggccaagaacgccgcagcgcgggcggcgctggagaagttcggcgacttgccgcaggacgtgctcgaaggcgctcgccgctcgaagtttgcgccgcccgtcgtgcgccgcggcctgcaacagcgcagtgatagcgctgccgcagccgcacctcccagcgacgaaggcactgccgccgatccggccgaggccagcaccggcgaggacgaacaggcatga

SEQ ID NO: 208 - DNA, 1689 bp, artificial
  Centroid sequence
atggccgaggcgatcaccctccacatcgaaggcatgacctgcacgtcgtgcgccgagcacgtccagcaggctttgacgaacgtgcccggcgtgcgcgcggcctcggtgtcctatccgcagcggcaggccgaaatcgaggcggatgcaggcgtgagcgtggccccgctggttgccgcagtggccacgctcggctatcgcgcacggcttaccgacacgccgaacaagcctgccggcctgctagacaaggcgctgggctggctcggtggcgaaacgaagcatgttggcggtgaacaagcgctgcacgtggctgtgataggcagcggcggcgcggcgatggcggctgccttgaaggccgtggagcaaggcgcccgcgtcacgctgatcgagcgcggcaccatcggcggcacctgcgtcaatgtcggctgcgtgccgtccaagatcatgatccgcgccgcgcacatcgtccacctgcgccgcgaaagcccgttcgatgctggcctgccggccgcagcgcccgctgtactgcgcgagcggctgctggcccagcaacaaggccgcgtcgaggagctgcgccatgccaagtacgaaggcatcctggcaagcactccggccatcaccgtgctgcgcggcgaggcccggttcagggacacgcgcacgctgaccgtggcgaccgctgacggcggcacgcacgaggtgaacttcgaccgctgcctgattgccaccggcgcgagcccggcgcttccgccaatcccgggccttgcggacacaccccactggacctccaccgaggcgctggaaagcagctcgctccccgagcggctggccgtgattggttcctccgtggtggcggtcgagttggcgcaagccttcgcccggctgggcagccaggtcacgatcctggcgcgcagcacgctgttcttccgagaagacccggccatcggggaagccgtaacagacgccttccgcgccgagggcatcgaggtgctggaccacacccaggcgagccacgttgcctatgcgggcggggaattcgtgctcaccaccgggcagggggaagtgcgcgccgacaagctgctggtcgccaccggtcgcgcgccgaacacgcgcagcctgaaccttgaagcggcaggcgtcgaagtcaatgcgcagggagccatcgtcatcgaccgcgccatgcgcacgagcgcaccgcacatctttgctgccggcgactgcaccgaccagccgcagttcgtctatgtggcggcggcggccggcacgcgcgccgcgatcaacatgaccggcggcgacgcggcgctggacctgacggcgatgccggcggtggtgttcaccgatccgcaggtggcgaccgtgggctacagcgaggcggaagcgcaccacgacggcatcgagaccgacagccggctgctgacgctcgacaacgtgccgagggcgctcgccaacttcgacacgcgcggcttcatcaagctggtggcggaagctggctcagggcggctgatcggcgtacaggcggtcgcgccggaagcgggcgaactgatccagacggccgcgctggcgatccgccaccggatgaccgtgcaggagctggccgaccagttgttcccctacctgaccatggtcgagggactgaagctcgcggcgcagaccttcaacaaggacgtgaagcaactgtcctgttgcgccggatga

SEQ ID NO: 209 - DNA, 1029 bp, artificial
  Centroid sequence
atgatgagcaaataccttagcgctcgggcctcgacccagtatttccaactgcaacgcaccgtggccgaggcgtaccacgttgacgacgcggcccggaccttcgccgtcgagccgacccacgcccaggaactcaatgaccagatcacagagcgcgtggacttcctgggccgcatcaacgtgattccggtcagtgaggtcaagggcgagaaagtcatgctcggtctgtccggcccggccaccagtcgcaccgacaccaacgcccgagaccgcgagccgcgccacctgctggacctgaagaacaacacctacgaactcgcgcacacggaaaccgacgtggcgctgtccttcgccaccatcgacgcctgggccaagttcccggacttcgtagaccgctacttgacggcggtgcagaagcgcatcgccctggaccgtatcctggtcggctggtcggggacgcacgccgccactcagaccgacccggcgaaatatccccagctcgaagacgtgaacaagggctggctccagatcgctcgcgagcagattcccgaacaggtgctcaggtccgaagacccggccaagaaaatcacccttggcccaggcggcgactacgccaacctggatgccctggtgcatgacgtgaaacagatgatcgacccggtactgcgcgatgaaggcgacctggtggcgatcatcggttccgacctgctggcagcggagaagagcacgctgtacgccgcccagggccagaagccgaccgagaaggagcgaatcgaagaggtcaaggtcactgagacctatggcggcctgccctcgctgctggtgccgttcttcccggtgatgggcgttgtcgtcaccagcctggacaacttgtcgatctactaccaggacagcagttggcggcgtcatctgctggagaaccccaagcgctcccgcgccgaggacttcaacgggcgtaacgaaggctacgtgatcgagcagcttggcaagttcgccgcgctggaaggatcgtcgctggaactggtgcgctga

SEQ ID NO: 210 - DNA, 1281 bp, artificial
  Centroid sequence
atgagccaggatgacactcccgaccttgccgcgccgcaggcggacaaggtggcgccggaggcagtggcgctgcgcgcccagccgcgtccagtcacacgcctgaaccggcgctcgctggccatccttgccggcgtcctagcggtcgccgtgctcggcgcgctgatgtggtcgctgcaacctcatcgacgcagcacaggcgagcagaccgagctttacaacgtcgatcgcgtgtcaaagtcggaaggactggatgcgctgccgacggactattccaagctgccgccggcgttgctgcctgccgttcccgaactagggccaccgctgccgggcgatcttggcccggctatcgtgaagtcgcagcaaccggcgacggctgcctacgcggcccccggtcacgacccgaacgatgccctgcgaaaagaagccgaggcggccgcggcctcgtccgtgttcttccgctcgggtgggcagaatgcggcgccggtagcgcagacacaggtggccgctgcgccgggcttcgccgccaatgcggcgtttgacccgctggcggccgggccggcctccacggcggcccaacctgctgacccgacagcggtgcaaaaccggcaagaccagaaagaggctttcatgaaagctggccccactgaaacccgtaattccggcaatctgactctgccaatttcgccgtatcaggttatggccggaacagtggtcgcaggtgccttggtgacgggcatcaagtcggacttgcccggcgacgtgatcgccacggtgacggagccggtctatgacacagccaccgggcgcttcctgctgattccgcagggttcgcgcatcctgggcaaatacaacagccaggtcagctacgggcagagccgcgttcaagtcgtctggaaccggatcatcctgccggacacgtcttcgctcacgctcgacaacctggccggcaccgacccagccggctatgccgggctggaggacgatgtggactaccactggggccgcatctttgccggtgcggcactcaccacgctgctgggcgtcggtgccgagctggccgcgccggagaaccggcaggatggtgatcgcgtcatcatcgctgggcgcgacagcgcgcaggacagcatcaatcaggtcggccaggagatgacccggcgcaacctcaacatccagccgaccttaacgcaacggccgggcctgccggttcgcatcatcgtcaaccgggatctggtgctgcggccgtaccagccgctgttcttcaaccgggggacttcacgatga

SEQ ID NO: 211 - DNA, 2376 bp, artificial
  Centroid sequence
ttggattccagtgggcacatattccagcaagaatacctctgtatattttctcaagctcaaatcgaggtaaaaactatggctgatgcaccaccgccactgattgttagatactcaagtcgccccgggaaacctggcggagttagcatagacgtatcacgagacaggcaggacatactaagcaactatccgttcggtaaccctttccgtggttttactctggccatggaggctgacttcaaaaagaggaaagagagtctggaagccgacgttcaggcagagttggatacggaagctgccaagtatccggcactacctgccagcttcacacctgagcagtggctggaaagatcaaccgtagttgtcaccgggctgctaaatcgaaagcgccctgaactagataacgaattggatgtggttcagaactcggctagtctggataagctgcaagcaagctacaacacaatcatcctgaatgatcagatcaatagtcttcaagagcgcttgaacaagctcaatgctgaaaccgaccgccgccgggcggaggcagaagcccagcgtcaggcagaagcggacgccaaacgcaaagcggaagaagcggcacgcctggaagcccagcaggtcactcaacagctcggtgccgacttcaacgcgatcaccactccgaccgccaccaaggtccagcaacgtgtgaaagcagtggatgctagtctgtctcaggtttccacccaggtcagtggtgcagtcgcctcggcaacccaggcggtgcaggtcaagacagcgcaagcccagcaacaagccaacagccagatttcgtccagccagaacctgatcagcgcggcatttcggaatcagattgccttggcagcacaggccagtggagaagcccaggtcacggctttcaacaccaaagtcaagcagatcgtcaacgaagccacggcgttttcgacagcacgaaaacaagcgctggctcagtttgctgccaatgcggccgccgaggtcgaaaccgaggtcaacaggctaaccgcccaggtcaaggccagccccaccaaggcggcttcgcaagctgcacaagcaacccttcgacaattcactgaaagcacctatgccaaggtgaacacctttgccctgcagaccgaagcagcgctgcaggccaaagccaaggaggtttcggcagcggtagccgaggcacagcgtgcggcgaccaacgatttgcaaaaaacagccgatgtagtaccaggtcagatcattcaggctgcgaacaccttggcgatgccggccacctctacgccgctggtttcggtggccgggtttggtagtgcggcagtggagacggctcgcctggcggcttccctaacgaatgctgtcaatcgcttgattcagattgctggtagtggacctggcgcatacgtggccaccttcgcggtgctatcgctctactccgaccaggctggtaaagacagtgacaaggttcctgccggcgttcgcaatgcattggcactggaggcgtccgctctggggcttcctggcacggctgatttgcaaagcgtcgccaaggcaggtggcacggttgatatgccggtacgactcacgagtgctgcacaagagagcccgagtggtaaatcgcagattgccgcgatgctgaccaacggggcaactgtccccaaaggcgtgcctgttcgcgccgcgaccctcaatactgcgacaggccggtatgaggtgacggttcccgcaaagtccaccgtgccgaatacacccccgctgatcttgacctggacccctgccacccctccaggaagccagaacccctcaagcaccactccggtcgtaccgcagccggctccggtgtatgagggagcaacgattaccccagtgcaggccgaaccggagtcctatccgggagtgccgttagatctggacgatctgatcgtgatcttcccggcgggctcggacgttcctccgctctatctggtcttttccaagccgccggttaagccgctggaagtggacatttatggtaattttgcaggaagacctcgtgatggaaaccatcttgaccatatgccggctcaaggtgcgttggcgacgagtttgagagctatttatccagacatcccctatggagaaattcgcaaattaatgaagaaaggggggagtgttgccataccagctagagtgcatcagaggttcagtgaaacctacggaggacgtaacaccaaagaaaagcaacagaaggatgcctccgacttgcgtgcagcagtcgatagcaatttcgatgccgtcaagaaaggattgctagaggaggggttctccgaagatgatattgagagggcgcgcgcagaactacacatggtgaacaaagaacaggggtggtactga

SEQ ID NO: 212 - DNA, 591 bp, artificial
  Centroid sequence
atggcagcgccagccctgacggcgcggtttcgcgtactggtgatcgctgctggcctgtacgcctgcgccgtccatgcccaggaggttccgcctccggcctatcagcttgccgcccaacgtgcgggcattccctccacggtgctctacgccgtggccttgcaggagagcggcatccggcggaacggacgcatcgtcccgtggccgtggtccctcaacgtcgccggccaatcgcgccgctatgcgacccgcgccgacgcctgcgccggtttgcagcaggcgatgcgctccacgccgcacacgcgcatcgacgcgggcctgggtcagatcaacctcggctaccacaagcaccgcttcaccagcccgtgcgacttgctcgatccgtaccgcaacctcgccatcgcctccgagatcctgaaggagcagcacatcccgggggagaactggctgctggcgatcggccgctaccaccgccccgcggggggcgagcccgcagcccgctaccggcggagcgtttcccgccacctcgcccgcgtgcagggcacgcgcccaaccgccgcggtcctcgccgcgcgccaggagaccaccccatga

SEQ ID NO: 213 - DNA, 213 bp, artificial
  Centroid sequence
gtggccgagggactatggaaggtgccggacgatctgcccgagcagggccgccgctatgacgcccagcgtcttggtggcgtgacggtggagctgaaatcgcacctgcccatcgagcggcaggcccgcgtgatcggtgccacctggcttgaccagcagttgatcgacggtggctcgggcttgggcgacctgggctttagcagtgaggccaagtag

SEQ ID NO: 214 - DNA, 276 bp, artificial
  Centroid sequence
atgcgcaaactgctgatcgccgtgcttttcgccttgcccttcgtggcgctggcggctcccccgaaaaccgtcacgctcgacgtgcagaacatgacgtgcggactctgtccgatcacggtcaagaagtcgctggagaaggtgtccggcgtgagtgacgtccaggtcaatttcgaccagaagacggcgaccgtcacctacgatcccgataaggcccagcccgaggcactgactgaggcgaccgcgaacgcgggatacccctccacagtgcagaagtga

SEQ ID NO: 215 - DNA, 738 bp, artificial
  Centroid sequence
atgtcccagaatcccaatccctttctacgcggctactggaatctgaaaatcgtccgcacgctgtccatcagctacgaggacggaagcccgcatgtttggcgaaacatccacccgagccagcagcacctctgcgacgcggcgctggtttcttctccttgcatcatcaccagcgacttcgcggtggtcaggactggcaccgaacctgtcggcgccgcactgatcgccgaatgcgacgcggctgaagggggcagcggcgaaggcatggtgggtgccgtggtgtacgcgatccacggcgacgacttcgacggccgccccgtccacattggcgacacctattcggccgaggccgcacgggaagtcgtgcagcggttgagcttcgagaccggctactacagccggtgctgggaaatcagcagcgcgcacatcagccgcgaaaccggccagtacctggccaacctggctgacctcgcgacgccggaggcctttttgttcatcgcgttccggattccctacagcccggcgatcggcgtcaagctgatctccacgccctggacggaccagcacctgcaggacgtcgaggggatcgccgccgagcagcttcggcaggagcaccgcagcaagggcatgccggacgagctggcacagatccttgaactggccggccaggccgacgtgcgcatcctcatcctcgatgccgacgcacccgtgttgccgggcctatcgctggccggcgaatag

SEQ ID NO: 216 - DNA, 2034 bp, artificial
  Centroid sequence
atgcggctgtttctgtgcgagaagccctcccagggcaaggatattggccggattctcggcgccacgcagcgcggtgaaggctgcctcaacggctccggcgtcacggtcacctggtgcatcggccatctcgtcgaagcggcagcacccgaggtctatgacgcggcgctcaagcgctggtcgctggaacagttgcccatcattccccagcagtggcgggtcgaggtcaagccgaagaccaccacgcaattcaaggtcgtcaaagcgcttctggcgaaggcgacccatctcgtcattgccaccgatgccgaccgcgagggcgaactgatcgcccgcgagatcatcgacctgtgcggataccgcggccccatcgaacgcctgtggctttcggcgctcaacgatgcgtccatccggtctgcgctcgccaagctgcggcccgcggccgacacgctgccgatgtattactcggcgctggcgcgctcgcgcgccgactggcttgtgggaatgaacctcagccggctgttcaccgtgctcgggcggcaggccggctacgacggcgtgctgtcggtcgggcgtgtacagaccccgacgctcaaactcgtggtggaccgcgaccgagagatcgcggccttcgtgtccgtgccgtactgggccatcgacgtgtccctgtccgcaggcggtcaggccttcaccgcgcagtgggttgcccccgatgcctgcactgacgacgccggccgctgcctgcagcagcccgtcgcccagcaggccgcgcagcagatccgcgccgtaggcagtgcccaggtggtgtcggtcgagaccgagcgcgtgcgcgaaggcccaccgctgttgttcgacctgggcaccttgcaggaggtgtgctccaagcagctcgggctggacgtgcaggagacgctggagattgcccaggccctgtacgagacgcacaaggccacgacgtacccgcgttccgattccggctacctgcccgaaagcatgttcgccgaggtgcccacggtcctggacagcctgctcaagaccgatcccacgctggctccgatcatgagccagctcgatcgcactcagcgctcgcgcgcctggaacgacggcaaggtgacggcgcaccacggcatcatcccgacgctcgaacccgcgaacctctccgccatgagcgagaaggaacaggccgtgtaccggctgatctgggcgcattacctggctcagttcctcccgcaccacgagttcgaccgcaccgtggcggatctctcctgcggccagcagaagctggtggccacgggcaagcaggtcgtcgtcaagggctggcgcctggtgctggccgaacccgaccgtgaaggcagcgccgacgaagatggcgacgcatctgcgcgcggccaggcgctgcctgcgctgcgtgacgggatggcatgccaggtcaccggggtcgacatcaaggcgctcaagacgatgccgcccaagccctatacccagggcgagctggtcaaggcgatgaaaggcgttgcgcgtttcgtgaccgacccgcgcctgaagcagaagctcaaggacacgacgggcatcggcaccgaggcgacgcgggccaacatcatcagcgggctgatcgcccgcggctacatcgtgaagaaggggcgctccatccgcgcatcggatgcggcgttcacgctgatcgacgccgtgcctgcggcgattgccgaccccggcaccaccgcggtctgggagcaggcgctcgacatgatcgaggcgggccagctcaccctggacgtgttcatcggcaagcaggccgcatggatttcgcagttgatcgcgcagtacggcagcacctcgctgtccatcaaggttccccaaggaccggcttgcccgcagtgcggggcgcccacgcgccaacgcagtggcaagagcggcccgttctggtcgtgcagtcgctatcccgactgcaagggcacgctgccggtcgaatccggcacgtccaagcgcggggcctcgcgcccgcgccgtaccagtggcggcggccgcaaaggctcctga

SEQ ID NO: 217 - DNA, 2022 bp, artificial
  Centroid sequence
atgcggctgttcttgtgcgagaagccctcccagggcaaagacattggccggattctcggcgccacacagcgcggtgaaggctgtctcaacggttccggcgtcaccgtcacctggtgcatcggccatctcgtagaagccgctacgcccgaagcctacgacgagcagttgaagcgctggtccatcgagcagttgcccatcattccccagcattggcgggtcgaggtcaaaccgaagaccgccacgcaattcaaggtcgtcaaggcgcttctggcgaaggcgacccagcttgtcatcgccaccgatgccgaccgcgaaggcgagttgatcgcccgcgagatcatcgaactgtgcggctaccgcggccccatcgagcggctgtggttgtcggcactcaacgatgcgtccatccgcgccgccctcggcaagctacggccctcagccgagacgctgccgatgtaccactcggcgctggcgcgatcccgtgcggattggctggtgggcatgaacctcagtaggttgttcacggtgctggggcggcaggccggctacgacggcgtgctgtcggtcggccgcgtccagaccccgacgctcaagctcgtcgtggaccgcgaccgcgagatcgcagccttcgtgtccgtgccgtactgggccatcgtcgtgtccctgtccgcaggtgtccaggctttcaccgcgcactgggttccacccaatgcctgcaccgacgacgcaggccgctgcctgcagcagccggtcgcacagcaggccatgcagcagatccgcgctgcgggcagcgcccacgtagtgtcggttgagaccgagcgcgtgcgcgaaggcccgccgctgccgttcgacctgggcaccttgcaggaggtgtgttcaaagcagctcgggctggacgtgcaggaaaccttggagatcgcccaggccctgtacgagacgcacaaggccacgacatacccccgctcggattccggctacctgcccgagagcatgtttgccgaagtgaccaccgttctcgacagcctgcttaagaccgatccctcgctgcgctcgatcataggccagctcgaccgtttgcagcgctcgcgcgcctggaacgatggcaaggtcacggcccaccacggcatcatcccgacgctcgaaccggcgaacctctccgccatgagcgagaaggaactggccgtgtacaggctcatccgggcgcattacctagcgcagttcctccctcaccacgagttcgaccatactgtggccaagctttcgtgcggtgggcagaaccttgcggccacgggcaagcaggttgtcacgccgggctggcgccaggtgctggccgagccgcagtccgaggacggcgatggcgacggcgacaccgcggcccgcgcccaggtgctaccggcgctgcacgaaggtctggcatgtcaggtggccgatatcgatctgaaggcactcaagacgctgccgcccaaaccgtacacgcaaggcgagttggtcaagtctatgaaaggcgtcgccaagctggtgtccgatccccgcctgaagcagaagctcaaggatacggtcggcatcggcaccgaagcgacccgggccaacatcatcggcggcctgatcgcccgcggctacctcgtaaagaaagggcgcgccatccgcgcctcggatgcggctttcaccttgatcgatgccgtgcctgcggcgattgccgaccccggcaccaccgccgtctgggaacaagcgctcgacatgatcgaagccggccagctcacgctggatgtgttcatcggcaagcaggccgcatggatttcgcagttgatcgcgcagtacggcaacgcgtccctgtctatcaaggctccccaagggccgacatgcccgcagtgcggcgcacccacgcgccagcgcagcagcaagagcggcccgttttggtcgtgcagtcgctacccggactgcaaaggcacgctgccggtcgaatccggcagctccaagcgcgccgcctcgcgcccgcgccgtagcggccgcaaaggctcctga

SEQ ID NO: 218 - DNA, 339 bp, artificial
  Centroid sequence
gtgctggtcatcaccgacagccgccatccggtcaagaccatgggcggcgagcggctgatcgagctggacgaagcgcaccggatcgaagcggagctttctgcggaactgcccgccgaacccgagcaggcgaccgccatcgtcaagcgccgactgaacagcggcggcaccgatctccaacgccgcatcgcttccgcctaccagggcgtcaccgacgcgtggagcctgggcatcaccagcatcccggccgtcgtggtggatcaacgctacgtcgtctatggcgaaccggatgtggcccgcgcagtcgctcgcatcgagcagcactggagggcccagccgtga

SEQ ID NO: 219 - DNA, 561 bp, artificial
  Centroid sequence
atgtccacatcgcatccgctcaaccaggccgtgattgcccaggcgctgtatgaccttcgcaacggccaactgcgccgctgcaaggccatgggcttcggcgaggccgagctggatgcgctcaagcaccccgcgctgatcagcgtgctggccaacgccagcgtctcgtggtgctcggtcacggtcaaccgcgaagtgctgcagcgcctgctcaaccaggcacaggacgtggagaaggaaatcgccacggtcgatcgcatgctgcggctgggggccagcacggagatggtcagccgcttctatggcctgacccatcaggaagtcgccctgcggcgggagatcctcggcctgcccaagcgcaaggggcgccaccccgtcctggacgagacccaggacaccgaactgtggcggcaatggaaagccgtgaccagcagcaggaacgtcgatctggaggacgagacctcgattctcgatgcggccatggacctggccgagggcatgtcgctgccgctctcggtggtctgggccgcgatcaggaactgggtcgatcagggattgggctag

SEQ ID NO: 220 - DNA, 384 bp, artificial
  Centroid sequence
atggtggcttcgatctggctgcgcgccgcgcatcgcggcgtgcccacttttctcgtgacggccctcctgctgggtcagtcccagatggccttggccgagtctccggcacagcgccaggagctggtcgccgcactgcgccagctcgacgcgctggagcgcaccgtcgcggacagcgccgcgcatgcccccatccagccgggcgagcgctaccacttcgactacccgcggctgctggctgacctggcgcgcgttcgcgccggcatccagtttcacctgacgccatcgcgcgctcagccgcgcgacccctccgaactggccggcgactaccgcaccgagcgggcggccgagccgctgccggcgacgactgcggggggcaagcaatga

SEQ ID NO: 221 - DNA, 441 bp, artificial
  Centroid sequence
atgagcacgcatttttggggtgaaggcaacattggctcaccgcccgagtaccgggagttccccaacggcaacgacgagccgcggcgcttgctgcggctgaacgtgtacttcgacaaccccgttcccaccaaaggcggcgacttcgaggatcgcggcggtttctgggcaccggtggaaatctggcaccgtgacgtcgcacactggaaggatctgtaccagaaaggcatgcgcgtgctggtcgtcggacgcatggagcgcgaaccctggacggacaatgaggatcagccgcgcgaaacctggcagatcaacgcgcgcagcgtcggcatcctgccgtttcgcatcgagtccgtgaccctcagcccgaagccgcaggatgcggaggcaaagtcccaggccgcccaggaaccggctgcgccaaaagagccgcggcgtaggaagtga

SEQ ID NO: 222 - DNA, 441 bp, artificial
  Centroid sequence
atgagcacgcatttttctggcgaaggcaatatcggctcgccaccggagtaccgcgaattccccaatggcaacgacgagcccaaccgcctgctgcgcctgaacgtctatttcgacaaccccgttcccaagaaggatggcacctttgaggaccgtggcggcttctgggcgccggtggaaatctggcaccgcgacgccgagcactggcagcgcctctaccagaagggtatgcgggtgctggtcatcggccgcatggagcgcgagccctggacggacaacgaagatcagccacgcgagacctggcaagtcaatgcgcgcagcgtaggcatcttgccgtaccgcatcgagtctgtggtcctcagcccgaagccacaggaggcagaaccgaagccgcaggccgaccaggaatcgaccgcgccgaaagagacgaagcgccggaagtga

SEQ ID NO: 223 - DNA, 1998 bp, artificial
  Centroid sequence
atgcaagggacgaacgttctgttcggccagatcgctgtggtaatcggcatcgtgatcgccggcgtctggggcgccacacaatggacagcagcgacccttggctatcaagtacgcctcggatcgccctggttcgatcttctaggtgtaccggtttatcacccgtggcgcttgttcgaatggtggttcttctttgatgcctacgcgccgcacgtcttcgacacaggcggtgcgattgcgggtggtagcggtttgttcgctttactcgtcgccatcgccatgtcggtatggcgttctcggcagtcgcggctggttacgacttatggttcggcacgctgggccgatgccgtcgacatccgcaaagctggactgaccctcccggcgggcgtcttcctcggccaacacgacgaccaatacctccgacatgaggggccggaacatgtcctgagcttcgcacccacgcgctcgggcaagggcgtgggcttggtggtgcctacgttgctttcgtggccggcgtccgccgtcattcacgacattaagggagagaactggaagatcacggcgggctggcgttcgcgcttttcgcactgcctgcttttcaaccccaccgataggcagtcggccgcctacaacccgctgcttgaagtccggcgcggcgcacatgaagtgcgcgacgtgcagaacatcgccgacattctggttgaccctgaaggtgcgttagagaagcgcaatcattgggagaagaccagccacgcgctactggtcggtgcaatcttgcatgttctgtacgcaggcgaggacaagacgctgcgcggcgtcgccaacttcctcagcgacccggcgtgtccgttcgagctgacgctgcaccggatgatgacgacgaagcacctgggcgatgcgcctcacccggttgtcgcatccgctgcccgcgaagtgctcaacaagtcggacaacgagcgatcgggcgtgctctccaccgccatgtcgtttctcggcctgtaccgcgacccgaccgtggccgaagtcacatcgcgctgcgattggcgcatcgccgacctgatttccgccgagcacccggtatcgctctatctggtggtgccgccctccgacataagccgcaccaagccgctgatccggctcatcttgaaccagatcgggcggcggctgaccgaatcgctcgacggcagcgatggcatcgcgcgccggcacaagctgctgctgatgctggacgagtttccggcgctgggtcgcctcgattttttcgagtccgcgcttgccttcatggccggctacggcatccgcagctttctcatcgctcaaagcctgaaccagatcgacaaggcgtatgggcagaaccattccatcctcgacaactgccatgtccgggtgactttcgccaccaacgacgaaaggacggcgaaaaggatttccgaaaccctcggcaccgccaccgagcttcgcgcgcagcgcaactacgcgggccaccgcctcgctccgtggctggggcacctgatggtgtcgcgtcaggaaactgcacgtccgctgctgacgcccggcgaggtgatgcagcttccacctgaggacgccgtagtcatggtgtccagcgttgccccgatccgcgcgaagaagctgcgttactacgtcgacgccaatttcaaggatcgcgtcctgccaccgcccgtgctcgcagtcgggaggtacgccgacgcgccgccagcccgccccgacgactggagcggcttggcgatcccggccgtacctacggcgccgacctcggtatccgccgatggtccgggcggcaccgatgacggcggcccgcgccgccagctcgaactctccgaaaccgtcgcctacgagcccgagttggacgcgtgtgcgaacgacctggagctgctcgatgacgacgacctggcgctcccgcttcccggccagctcgacccggccatgcagcgcacggcccggctggcttctctcgaccccaacgacggaatcgacctatga

SEQ ID NO: 224 - DNA, 2451 bp, artificial
  Centroid sequence
atgctgaaccttgccgaatatcgtcagcgcccggccttgcttgccgactggctgccctgggccgggctggtcgcgccgggcgttgtgctgaacaaagatggttcgtttcaacgcacgttccagtttcgcggccccgacttggacagtgcgacacagggcgagctgattgccacgtcggcgcggcagaacaacgcgcttcgccgtaccgggtctggctgggccttctatatcgaggccgagcggatgcgggcatcgagctatccgcaatcctcctttcccgaaccactgtcctggctggtggatgaggagcgacgcgcggcgttcgaggagtcggatggccatttcgagagcgtctatcacttcacgttgcaacacctaccgccgcaagagtctcgcgcccgtgcggctgggatgctgtacgagaaccggcccactgagggtgtggactggcgtggtcggcttgattccttcgtggcagagaccgatcgcgtgttcgacctgctcgatggtgtgatgccggagattgcctggctggacgatagccagacgctgacctacctgcatgccacagtctccacgcggcgctatcgcgtcggcgtgcccgacgtgccgttccatatcgacgcactgctggccgatgccgcgctggtcggcggcctggcgcccatgctgggcgatcagcacctgcgcgtggtgtcggtacgaggcttcccgacctcgacctggccggggatcttggacgacctcaaccgcctgggctttgcgtatcgctggagtacgcgcttcctgtgcctggacaaagccgaggcggaacgggaattggggcgcttgcggcgccaatggttcgccaagcgcaagaacgtcatcgcgctgctgcgcgaaacgatctttcagcaggaaagcccgctggtcgataccgatgccagcaacaaggccgccgacgccgatgccgccttgcaggagctgggcagcgatcaagtcgccttcggctacctcaccgccacggtgacggtgctcgacgccgacccggccgtggccgacgagaagctgcgcatggtggagcgcgtcatccagggccggggtttcgtgaccatccccgaaaccctcaacgcagtcgatgcctggctgtcgtccgtccccggcaacgcatacgcgaacgtgcgtcagcccatcgtttcgacgctgaacctggcgcacatgatgccgatgtcagcggtatgggctgggccggagaagaacgaacacctcgatggcccgccgctgatcgtcacccgcaccgatggcgcgacgccgttccggctggtgacgcacatcggcgacgtggggcacacccttgtcgccgggccgaccggcatgggcaagtcggtgctgctcgccatattggccatgcagttccggcgctacttcggctcgcggatcttcgccttcgacatggggcgctcgatgcgcgccaccatcctcggccttggcggtgagcactacgacctcggtgccgatggcggcatcgccttccagccactcgcgcgaatagcccacgagggctaccgcacctgggccgccgaatgggtggagggccggctgctgcacgaaggcgtgacggtcggcccggacgagaaggctgccatttggtcggcgctgcgaagccttgccggtgcgccagtggagcagcgcaccatgaccggcttgtcggtgttattgcagtccaacgcgctgcgccaagcgctcgcgccctatgtgttgggcggcgcccacggcaagctgctggacgctgaccacgaccggctgggcatggccgacgtgcagggctttgagatggaagaactgatgcacagccccgccgccgtgcaagcagtgctgcgctacctgttcgcccgcttcgacgaacgttttgacggcgcgcccacgctgctgatcctcgatgaagcgtggctgttcctcgatgagccgtccttcgcggcccgcatccggcaatggctcaagacgctcagaaaaaagaacgtcagcgtcatctttgccacgcagtcgctggccgacatcaaggactcgaccatcgcgccagccatcatcgaaagctgcgcgagcaggatcttcttacctaacccgcaggccaccgagccgcagattcgcacgatctacgaaggcttcggcttgaacagccgccagattgagatcgtggcgaccgcacagcccaagcgcgattactactaccagtcgcgcctcggcaatcgcctgttcgacctcgacctggggcctgtcgcgctcgcattcgcgggcgcatccacccctcaagaccaacgcgatattgaccgcgtgctgacgcaggccggcgctcccggcttcgccggcgcgtggctgcgccatcgcggcctcggctgggccgccgacctgctgccgtccgctccggcggcagcttcctttctcgcttctcaaccgctggaggtttcaccatga

SEQ ID NO: 225 - DNA, 726 bp, artificial
  Centroid sequence
atgaagaagcgccttgtcgccgctgccatcgcggccatgctttgcaccgccaccgcccatgcgcaatgggtcgtgatcgaccccacgaacctcgtgcagaacacgctgaccgcgatccgcacgctggaacagatcaacaaccaaatccagcagcttcagaacgaagcgcagatgctgatgaatcaggcgcgcaacctcgccagcctgccgtccagcgtcgtcggccagttgcgcgccaacctggcgaccaccgagcggctgatcgcccaagcgcgcggcttggcctacgacgtgacgaatctggatcgggagttcgcgcgcctgtacccggagcagtacgccgccaccgtcagcggcgaccagatgtaccgcgacgcccaagagcggtggaagaacacgctcaacggcttgcagaccaccatgcagatgcaggcgcaggtgtcgcagaacctgggcgaagacgaaagcgtgctggccgatctggtcggcaagagccagtcagcgcaaggcgcgctgcaagcgatgcaggccatgaaccagttgctcgccttgcaggccaagcagtcgatccagtcgcagcggctccagatcacgcaagaccgggccgcctcgctggaactggcgcggcaggcggcggccaccgagcgcgcccgcgaagtgcggcggcgcttcctcggggaaggcacgccgtacacgccgcagtccgtcaacttctaccgcgactga

SEQ ID NO: 226 - DNA, 315 bp, artificial
  Centroid sequence
atggccaacatcggcaccttcaccgcagacaaagacggcttcaccggcacgcttcgcagcctgacgctcaacgtcaaggtcaagctggtgcccaacgacaagggggacaacgagaaggcccccgacttccgcctgcaggcgaccagccacgacatcggcgcggcgtggaagaagaccagtgaggccgggcgggagtacatctccgtgaccctcgacgatccttcgtttccggccacggtctacgcccgcctgatcgagggcgaagacggcacgcacgacctgatctggtcgcgcagcaagccccaggcggcgtga

SEQ ID NO: 227 - DNA, 2202 bp, artificial
  Centroid sequence
atgcggtggaaactcccatggccgaagctggccggcgccggctccagtagcccggctagcgatgagcagccggacagctggcagcgccacgtcgaggccttgcgccaggccggcatccccgaacccggttcggcagtccacggccgcaagccagcgaccgtggccgacgagcaggcgctgtacgacgttgcgccgtccttcgtggaactgctgccctgggtggagttcttgcccgggtcgaaatcgatgctcctggaggatggccaatcggtggcggcgttctacgaactggtgccgctgggcaccgaaggccgggaacccggctggctcgcgcatgcccgcgacgccctggaaaacgcgcttcaggacagtttcgatgaactggacgagaacccgtgggtgctccagctctatgcccaggacgaaccgagcttcgaccagtacatgcagaccttgcgcgattacgtgcagccacgtgcgcgcggctcggcgttcaccgagttctacttgcgcttcttcggccaccacctgcgcgctgtggccaagcccggcggcctgttcgaggacacggtggttacgcggctgcgctggcgcgggcagacgcggcgtgtgcgcatggtggtgtaccgccgcgcgagcggacagggacaggcaaaccgccgcggccagacacccgagcagatgctgggcatcgtctgcgaccgcctatgcggcggcctggcgaacgccggcatccaggcccggcgcatggttgcagcggacgttcacgactggctgctgcgatggttcaacccgcgccccacgctgctcggccctggggtggaggaccgggagcgcttctacgcgttggcgcgctatccggacagtaccgaggaaagcgaggccggcgagatcgagttggcgagcgggcgggatttcagccagcggctgttctttgggcagccgcgctcggacgtggcgcaaggggcctggtacttcgacggcatgccgcaccgcgtgctgatcaccgaccggctgcgcatgccgcccggcaccgggcacctgaccggcgagacccgcaagggagacgcgatcaacacgctattcgatcagatgcccgaggacaccttgatgtgtctcaccatggtggccacgccgcaggacgtcctcgaatcggacctcaaccatctggcgaagaaagctgtgggcgagacgctggcgtcggagcagacgctcaaggacgtgcatgaagcccgctccctgatcggcagcgcgcacaagctctaccggggcactctggcgttctacctacgcgggcgcgacgaggcggaactggatcggcgcggcctggacctcgcgaacgtgatgctcaacgccggcctgcagccggtgcgcgaggacgacgaggtggcgccgctcaacagctacctgcgctggctgccgtgctgctacaaccccggcaaggaccggcgccggtggtacacgcaactgatgttcgcccagcacgcggcgaacctgtcgccggtgtggggccgcgcccagggcacggggcaccccggcatcacgatgttcaatcgcggaggcggcccgattacgtttgaccccttgaacaggttggatcggcagatgaatgcccatctgttcctgttcggtcccacgggctcgggcaagagcgccacgctcaacaacctgctgaaccaggtcaccgcgatctatcggccgcgcctcttcatcgtggaagccggcaacagcttcggcttgttcagcgacttcgccaggcgcctggggctgaccgtgaaccgggtcaagctggcacccggctcgggcatcagcctggcgccgttcgccgacgcacgccggctgatcgaaacgcccagcgacgtgcagacgctcgatgccgatgcactggacgaagacctgccaccggatgcctcggccatggaggcggacgagcagcgcgacgtgctgggcgagctggagatcacggcacggctgatgatcacgggcggcgaagacaaggaagaagcgcggatgacgcgggccgaccgctcgctgatccgccagtgcatcctcgacgcggccgaacattgcgtggcagagaagcgcactgtgctcacgcgcgatgtgcgcaatgcgctgggcacccgcgggccaggaaccgacgtgcccgagatgggcccctgcgctgctggagaatggcggacgcatggactgttctgctag

SEQ ID NO: 228 - DNA, 2451 bp, artificial
  Centroid sequence
atgctgaaccttgccgaataccgccagcggcccgcgctgctggccgactggctgccctgggccgggctggtcgcgccgggtgtcgtcttgaacaaggatggcagtttccagcgcacggcgcgctttcgcgggcctgatctggacagcgccacgcaaggcgagctgatcgccacgtcggcgcggctcaacaacgcgctgcgccgcctgggttcgggctgggcattgttcatcgaggccgagcgccggccggcggcggactatccgcactccgactttcctgaaccgctttcctggctggtcgatgaagaacgccgcgcggccttcgaggaatcggggcatcacttcgagagcgcctatcacctgacgctcgcgtacctgccgccggaggaatcgcgcgcccgcgcggccaagctgctctacgagaactcccccggcgacggcgtggactggcgtggccggctcgataccttcgtggcggaaaccgatcgcgtgttcgacctgctcgacggcgtgatgccggaaatcgcctggctcgatgatgccggcacgctaaccggcctgcacgcgacggtttcgacgcggcgctgccggctgggcgttcccgaagttccgttccatatcgacgcgctgctggccgactgcgccctggtcggtggccttgcgccgatgctgggcgaccaacacctgcgcgtggtgtcggtgcgaggctttccgacttcgacgtggcccgggattctggacgacctcaaccgcctgggctttggctaccgctggagcacgcgctttctctgcatggacaaggcggaagcagaaaaagaacttggccgcctgcgccgccagtggtttgcgaaacggaagaacgtcgtcgcgctgctacgcgaaacgatcttccagcaggaaagcccgctggtcgataccgacgccagcaacaaggcggccgacgccgatgccgccttgcaggagctgggcggcgatcaggtggccttcggctacctcaccgccacggtgacggtgctcgatgccgacccggccgcggcggacgagaagctgcgcatggtggagcgcgtcatccagggccggggtttcgtgaccattccggaaaccctcaatgccgtcgatgcgtggctgtcgtccattcccggcaatgcctatgcgaacgtgcgccagcccatcgtttcgacgctgaatctggcgcacatgatgccgctgtcggcggtatgggctgggccggagaagaacgaccacctcgacggcccgccgctgatcgtcacccgcaccgatggcgcgacgccttttcgcttggtcactcacatcggcgacgtaggccacacactagtcgccgggccgaccggcatgggcaagtcggtactgcttgccatcctggcgatgcagttccggcgctatcccggctcgcgcatcttcgctttcgacatgggccgctccatgcgggcgactgtgttgggcttgggcggcgagcactacgacctcggcgccgatggtggcatcgcgttccagcccttggcccgtatcgagcaggaaggctatcgcacctgggcggccgaatgggtggaaggccgcctgctgcatgaaggcgtgaccgtcggcccggacgagaaggcgaccatctggtcggcgctgggcagcctcgcgggtgccccggtggaacagcgcacgctgaccgggctttcagtgctgctgcaatcgaacgcgctgcgccaggcgctgtcgccgtatgtgctcggcggcgcgcacgggaagctgctggacgccgaccgcgaccggctcggcagcggcgacgtgcagggcttcgagatggaagaactgatgcacagccctgccgccgtgcaagcggtgctgcgctatctgttcgcccgcttcgacgagcgtttcgacggtgcgcccacgctgctgatcctcgatgaagcctggctgtttctcgatgagccgtcctttgccgcccgcatccggcaatggctcaagacactgcgcaagaagaacgtgtcggtcatcttcgccacacagagtctggcggacattaaggattcgaccatcgcgccggccatcatcgaaagctgcgccagccggattttcttgcctaacccgcaggccaccgagccgcagattcgcacgatctacgagggcttcggcctcaacagccggcaaatcgaaatcgtcgccaccgcgcagcccaagcaggactactactaccaatcgcgcctgggaaaccgcctgttcgacctcgacctggggccggccgcgctcgccttcgcgggcgcatccacaccgcaagaccaacgcgacatcgaccgcgtgctgacgcaggccggcgcccccggcttcgccggcgcgtggctgcgccatcgcggcctcgattgggccgccgatctgctgccggcctcgccggcggcggcttctttcctcgcttctcaaccgctggaggtttcgccatga

SEQ ID NO: 229 - DNA, 387 bp, artificial
  Centroid sequence
atgacgcacgttgatgctttccgtctttccgtaaatcctatttctcgcctgtccagcatggcgcggctgcgccacctggcccgtcccgcagggcaagggctgctgctggccgcgctgatgctgttgctggcgggcacggcgcaggccgccggttcctcgatgccgtgggaagggccgctgacctccatcctcgaatccatccaagggccagtcgcccggatcgtggcggtgatcatcatcatctcgacggggcttgcgctggcgttcggtgataccagcggcggctttcgcaagctgatccagatcgtgttcggcctgtccatcgcgttcgccgcgtcctcgttcttcctgtcgttcttcagcttctccggaggggccgtcgtatga

SEQ ID NO: 230 - DNA, 993 bp, artificial
  Centroid sequence
atgaatgatcttttccgtaaatccgccttgccggtgatcttgcttgccctggcgggctgcgccacgcagggcaagccaccgccgaccatctcgctcgatgagccggtgcaggcccagccgctacccgagccacccgcgccggtggaggtggtggcggtgcccgaggtgctgccgatgccggcgcagttgaagccattgcccgaagccgaggacgccaagcccacgccggagccagccgacgagaaggtgcgcatctcacgggccaatgccgaggcgcgcgtcgcacccacgcgcgagggatacgtcaacgcgattcaggtgtggccgttcaccgatggcgcgctctaccaagtctatgcagccgtgggccgcgtgaccgtgatttcgctccagccgggcgaggagctggtgacggtggccgctggtgataccgtgcgctggatcgtgggcgatacgtcgagcggcagcggcgccgacctgcgcgtcaatgtgctggtcaagccgatccgatcgggcctcaagaccaatctcgtcatcaccaccaaccgcaggacgtacctgctggagttggcttcgacggaaaagacgtggatggcgtcggtgtcctgggagtacccgcgcgaccggatgctggccttgcagcgccaggcgcaggcggccagcgccgccgcgccggtcgataccgggctgtcgctggagaacctgcgcttccgctacgcgatcagcggcagcagtccgccgtggaagccgctgcgcgcgttcgacgacggcgagaaggtctatatccagttcccgccgggcatcgcccaaggcgagctgccgccgctgttcgtcatcggcgcgcagggtgatgggcaactggtgaactaccgtttccgctcgccgtatttcatcgtcgatcggctgttcggcgccgccgagctgcggctgggtggcgacaagggcgacgtggtgcggatcgagcgcacggacggcgttgcgcggaggaactga

SEQ ID NO: 231 - DNA, 333 bp, artificial
  Centroid sequence
atgggtttactcgctattgttgctgcaattacttataccgtgggtaagcgcccttatggttatatggggctaggtgatatctctgttttaattttctttggctggttgagtgtcatcggaacttattacttacaatctaacacctttgatattgttaccctacttcctgctacggcctgtggtttactttctgtcgctgttctaaacattaataatatgcgcgatttagaaagtgatattcaggcaggtaaaaatacattagcggttcgcttaggccctgctggctctcggacttaccatacctgtgttattttctctctattgcctgcttaa

SEQ ID NO: 232 - DNA, 1326 bp, artificial
  Centroid sequence
atggtgcagttttattcccctaaaaaacgtcctgcgaaaaaacaggcgatgattctggaagtgaccgccagtgcattggatgcaaatggtcaaggtattgctcatgctgagggcaaaacaatttttgtaaaaggactactcccacaagaaactgctcgtattcgtttaacagaagaaaagcgccagtttgctaaaggcgaagttattaagcgtttaacgaccagtgaacagcgcataaaaccgcattgtgaatattatgagcgttgtggtggttgtcagcagcaacatgtccctattgcgctgcaacgtacaacaaaagccagtgtgttatcgcaccttattaaacgtgaaaccggtgtgattatttcagctgagcctgttattgcaggtgccgaatatggttaccgccgtagagcaagattaggattgcgctatcaatctgaaaaagggttggtgatgggctttcgccaagagcgttctaacgatttggtgatgataaaaaaatgtccagtgttaaaacctcaattaaatgatttattgtctcctctttggacatgccttaacaaattaacatcagcacgtgatttagggcatgttgaaatggtgcttgctgataatgggccatcagttattttacgtcatttatcgccattgtctgagcatgataaacagagtttgcgtgatttctctcaaacttatcaagttacgatgtatcttgcaggtggtaatagcgagatagcacgattaacttcaattgagcaggaacccttctatcaaatagaaggtctaaatttacgttttgcacccactgattttattcaagtaaatgatgaaataaattctcagatggtcgctcaagctattgaatggcttgatttatcgccagaagatcgcgtattagatctgttttgtggtatgggtaactttactttacctattgcaaaacgcgtcagtgaagtagtgggtatagaaggtgtacctgcactggttgaaatggcgaaaaagaatgcaaaactaaaccaactaggtaatgcgcatttttggcatgcagatttatcggctgatttttctgcgatgtcatggtcgaaagaagggtttaacaaagtgttgttagatccggcaagagcaggggcgttggaggtaatgtcacacatagtgaagttatctgcagaaaaaatcgtgtatgtctcctgtaatccgaccacgttagccagagatagtaagatattattagattctggatatcagctaaccggtttaaaaatgttggatatgtttccacaaacgggtcatttggaatcaatggcacagtttagtcgaaaataa

SEQ ID NO: 233 - DNA, 495 bp, artificial
  Centroid sequence
atgaataagcagaaaaaacgtgtttatatcatcttgggaagtaatttggattcacctgaaaatcaggtgaattcagcgattaaggcaattagtgagatcccacaaacaacattaattgcacaatcatcttggtatcgtactcgccctatgggaccacaagatcaacctgattaccttaatgtcgctgttgtggttgatacaacattagcccccgaagagttgcttaataacactcaagcaattgaattagcacaaggtcgcgtcagaaaagaaggcaatcgttgggggccgagaacgcttgatattgatattatgttatttggtgatgatgtgatccaaaccgagcgattaacggtacctcattacggacttaaagtccgcgaatttatgctttatccattagcggaattagcccccgaacttcgttttcctgatggtgagttattagcagatagattggcgttagtgcctgaaaatggcatggaaaagtggtaa

SEQ ID NO: 234 - DNA, 1695 bp, artificial
  Centroid sequence
atgtctaatagttcgtttaatcgccaatgggctaaagttatactcgaaactttgactcgtcatggcttgcgccatatctgtattgcccccggatctcgttcgacccctttaacactagcggcggctgccaatcaaaaattagtttgccatacacattttgatgaacgtgggcttggtcatttagccttggggttggcaaaagcaaccaaagaacccgttgcggtgattgtaacttcggggacagccgttgcgaatttatacccagccttgattgaagcgggattaaccggtgaacgtgttatctttttaaccgcagataggccgcctgaattaattgattgtggtgcaaaccaagcgattcgacagcaaggtatttttgcaacgcatccttcacaaaccctctctttaccaagaccaacagcagatatttccgcgagttggttagtttctacccttgataatgccatgaatacgttggtacatggtgcattacacgttaattgtccttttgcagaacctttatatggtgatgatgttgaaacatcgacaccatggactgatgttttaggagattggtggcaaagtgataaaccgtggctacaagaaactcgttttaacgcagtttcaacacatccgcaatggaatgagttacgccagaaaaaaggtgttgtgatcgcagggcgtattagcccagaagaaggtgttgcagtcgcaaaatgggcatcacaattaggttggcctttattaggtgatgtattatcccaaacagggcaaccactaccttgtgccgatttatggttgaataaccctcaaataacatcagaattaaatcaagctgaaatcgttattcaatttggttcaagcttaacaggtaaacgtttattgcaatggcaagtgggatgttctcctaacgcttattggattgttgaccctattccgggacgcttagatcccggtcatcatcgaggtgagaaatttacattatcacctatgcagtggttaatggcacatcctgcggttgataattcaccgtggactgatgcattagctcatatagccaaacaaacctatcaaaaagtcagtgaaataaccgattattttggtgaagcactggttgctcaccaattagataaattacttcctaatgatgggcaattatttgttggcaatagtctgatagtacgattaatcgatgcatttgctcagttaccacaagggtatcctgtgatgagcaatcgaggagcaagtggtattgatggcttaatttcaacatctgcaggtgttcaccgtgcgacagaaaagccaacattaacaattttgggtgatttatcggcactgtatgacctaaatagtttagcgttacatcaacaagtttatgcacctaatgttattatcgtagtgaataataacggtgggcaaatattttctatgttacccacgccagagacagagcgagaacgcttttactgtatgcctcattcactaaatttcaaacacgcggccgcaatgtttggtttgcattatgtatcaccaacaagttgggatgcactgttaacgactgttcaggaatgctggacaggggcgccaataacgacattaattgaattaattgttgatgatactgatggcgcaaaaacattaaatcagttggtaaaacaggtaacatctcatgactttagcatgtcagcgatataa

SEQ ID NO: 235 - DNA, 426 bp, artificial
  Centroid sequence
atgcccatttccgtcagtgaaataatggaaatattgcctcatcgttatccattcttattaatcgatcaggttatttctaaacccgctgaacttgccagtggaaaattaaccgctattaaaaatgtcacaaccaatgacactgttgtttttggcgaattttacccaccgttattactacttgaaagcatggctcaagcatcaggcattcttgcacattactacctttcacctatgagtgaagatcagcgatgttattttgccagtataaaaaacgcacgcttttatgatgtggttaaagccggtgatcagctacttattgagatccaattttgccggcagcgacgcactattgttagcttttcaggtacggtgaaaattggggaaaagatagtttgtacctctgaatttatgtgtgcaaggcaataa

SEQ ID NO: 236 - DNA, 885 bp, artificial
  Centroid sequence
atgacaactttgatttacgtactaggttcagacattgtgcatcataacaacacaatgttacgtttttttaacgaccacctcgtgactgaggcggggttaatgtataaacctcgttttatcgttgccagtaaaaatacttcactgcaagaaagctacccagctttagatattgagtgtttagtcgataaaaagcaggttgcacagagagtggtcacattggcaaaagccgatactcaccaacgattcctttttttaggccagtttaatgcacctatttggttggcattattaacaggtaaaattaaacgtcatcaattttggtggcatatttggggtgctgatttgtatcaggattctaaacagctaaaatttagacttttctatcttcttcgtaaactcgctcaaaaacgcgtggggcgagtatttggtacacgaggtgatcttaactacttcgcgcaatttaacgttaatattcctgccaatttactctatttcccaacaagaatggatcctgcgcttacggtgacagaaaaaacgcctattgatgaaaaacaacttaccattattgtgggtaattcaggggatagctcgaatcgccacattgaagcgttacaggcaattgcagagcaatatggaacacgtgcaaaagtgattattccaatgggatatcctgaaaataatcacgtttatattgatgaagtcgctcaagccgctagccagttgcttccctataatcaggttgaaatattacgtgataaattggtatttgatgattatctagcgttattgaaaacatgtgatttaggttattttattttttcatcgacaacaaggtattggcaccctttgtctgcttattcaatttgcgatcccttttgttattag

SEQ ID NO: 237 - DNA, 750 bp, artificial
  Centroid sequence
atgatacatttgctgattattgatgctttaaacctgatccgccgcattcatgcggcatcaggttcttcttgccaaactgtgtgtgaacagagtgtcaatcagctgcttggtcacacacaacctacccatgctgtagcggtctttgatgaagatgatcgagagggtagttggcgacatcaactcttacccgattataaagcaggccgcacacccatgcctgatgacttgcgacaacaattacctgaaattaaagcaatgttacttaatttaggaatacaaagctggcactcaggtggtgatgaagcagatgacgttgcagcaacactggcaaccaaagtggcaagtgcaggttttcgagtcacgatcatttcaacggataaaggttattgccaattactttctccctctattcgtatacgcgattattttcaacgacgctggttagatttagaatttattagatctgaatttggtgtcgaaccatctcaacttaccgattattggggattaacgggcgtcagtagcagtaaggttgtaggagttcctggtattggccctaaaagtgctaccgagcttttacaagcttatccagatctagaatcgctctatcaacatattgatgatgttcctactaaatggcaaaacaaacttactactcataaagagtctgcatttatcagtcggaaaatcgcaacattacgtactgatattcaattaaacggtaatctacaacagttgcgtttaaaatag

SEQ ID NO: 238 - DNA, 795 bp, artificial
  Centroid sequence
atgaacacgggattgaatgctgggttgcgtattgaaaagttttctacgggatatgcgaagcgagaaatcattaaagaattaacggtctcactgcttccacgagggaaaattactgttcttttggggcctaatggcagtggtaaatcgacgttgttaagggcgcttgctgggcttaatagcgcacaaggaaagctttttcttggtgatgatgagttactctccctctctttttctaaacgagcagagcaggtggtttatttgccacaaactttacctgcgggtgttcatttgagtgtcttggagtcaattctggttgcaagacgagctttaggtgaacatcgttctcattcagcgaatgatgaagttatagatctattagaacaactgggaatttcacatttagctatgcgatatcttgatgagttatccggtggacagaaacaattggtggggcttgctcaatcactaattcgacgaccaagtttattattgctagatgaaccacttagcgcactcgatcttaattatcagtttcatgtgatggaattaatcgcgagagaaaccaagaaacgtaatatgattactgtggttgttgttcacgatattaatattgcattacgccatggagagtatgtattaatgcttaaaaatggggagttagttgccaatggtttaccaactgaggtgatcacaccagaaatactcgccgatgtttatcgcgttagcgcccgtattgaacgatgctctagaggccatccacaggtattaattgatgggaggataaatgatatatag

SEQ ID NO: 239 - DNA, 549 bp, artificial
  Centroid sequence
atgatcgggttaatcttacgtcctgataaattaacccatttccaactcggtgatgatgtcattatcacacaagcggtgttgagtaatgagcaggcacaactcgcatcattgcgtgccgaaaaattgggttttatgctccaaagtggcggattacttccctttttaaccgtcatgcaaaatattcaattacctcgcaaaatgctgggattaccgccacactccgcttggcttgatcacgccattgaccatctgcaattacgcccattgttaactcgtcttcctcgccaactctctattggtgagcgccaacgggcagcgtttattcgcgcaatcgctcatgagcctgctttattacttgctgatgaacctacagcagcccttgatccccataatgcacaagcgctgtatgcactcattgtagagatggtaaagcaactggaaatttctgcgctggttgttagccacgattggtctttagtcgagcgttttggatttagccactatcacgcacaactcgaaggaggcggtagtgtctttatcaaacaatag

SEQ ID NO: 240 - DNA, 1011 bp, artificial
  Centroid sequence
atgaataaagaaattaatcctttgattaaatttactaaaaaacagcgcattgacgacaaaaaaaagctgtttctaatggtgctagtattatgtttcttgtttattttttccctctctgttggtgagatttcgttatttccacatcaatggttaacagatgaagcccatttatttgtttggcagatccgtttacccagaatacttgcagtaatgacagttggcgccagcttagcaattgcaggtgctattatgcaggctttattccaaaatccactcgcagaaccagggttattaggcgtaagcagtggtgcgggtgtgtgtgttgtattgctcattgttttgcaatttaatttaagcttttggttaataagtagtgccgcgatattcggtgcattaggtattactctcttattaatgttttttgctcgaataaaaaagctgtctaacgctcagttactattaattggggtggcattaggcgttatggcaagcgcgataatgacctggctggtttatttcagttcagctttagatttaagacaattaatgtattggttgatgggtagttttagtggcattgattggcgtcatcaaatcttattttggactcttatacccattgttttaattcttattctacaagccgatgttcttaattatttatctctaggttcatttagagcaaagcaattaggtatatccgttaatcaatggagaaattggtttattttagcggttgggttattgatagggctaagtgttgctttagcgggtgctataagctttgtagggcttgttgtaccacatttattgagactatgtggattaacgcattataaaaccttactaccagcgtgtgcacttgctggaggtggattgctattacttgctgatctgctatctcggttgattttaaatggtgcagaagttcctataggggtgattacagcaacgcttggtgcacctttatttatttggttattggcaacaaaagagatgggacgtttgtaa

SEQ ID NO: 241 - DNA, 606 bp, artificial
  Centroid sequence
atggtattaaatcttcagcaatttagttttacccccaaaggcgacgaaaaacctattcttggccctattgatctgcaactaaaacaaggggaatggcttgttgttttgggaggaaatggcagtggaaaaagtcttcttgcccagctattagcaggttggtatcccgatttattaacaggctctgtgcaaggcttgggtattgtacaaaacattgctctagataagggtcggttagtatcactcgccccaggaagacaacttgttcaacaatcccctcaattacaactttcaggttgtgcttttacagtagagcaagagattgcttttggccctgaaaatttagggctaagtgataatgaagttcgatttcgtataaaagaagcaatgaagttaacacaatgtgacaaccttcgttttcgccccccttctactctttctggtggagaggcacagcgtgttgtgattgcaagcgctcttgctatgcatcccaaattattattacttgatgaagcatttagtcgtttaacaccgaatgcaacacaacaattgcaacaacgcattaaacagtatgcacaagagcacaaatgtagtgtgattattttttga

SEQ ID NO: 242 - DNA, 714 bp, artificial
  Centroid sequence
atgttaattgacattcatgatttacatgttcaatttgagcaaggcaaacaagcaaagcacgttgtaaaagggatcaacttacatgttcaacaaggtgaaacttttagcttaataggtcgttctggttgcggaaaatcgactattttacgagtgattgctggattattgactcattggcaaggtaacatgtcacttttagggcaaaccattaaaccacaacaacgttttcaaggcgcattacgtcgtaatatacaaatggtatttcaagatccctacgcctctttacaccctcaacaccgtattgagcgtgcgttttccgagcctttaaaaatccatcaaattcctttcgataaagatacgattaagcaagcattggcccaagttggtttgcctgcagatgtgacaagtcgttatcctcatcaactttcgggtggacagcgtcaacgcgtcgccattgccagagcccttttattacaacctcaattattgcttttagacgagccaacctcagcgctagatatgtcagtacaagccgagatcttaaatctgcttaacaccctgaaaaaagagcataatatgacatatttattagtcagccatgatgctgatgttattgcacatatgtcagatagagccgcattaatggaaaatggtgaactaacacaacattatgatcgggaggcgttatcaaaagggatacatcgtctcgattga

SEQ ID NO: 243 - DNA, 1053 bp, artificial
  Centroid sequence
atgaaaaaaaacacatcagataatgtgaaaacccattatcgaaaaatgatgaataaacgcatgctatggttgggaattatcgctttaattatttgtggttctgtggtgttagatttcaccatggggccttcaggcttatcacttgataaattattaacaaccctgtttcaacctgagcttgttgatgcgggttcgcgagtgattgtatgggatatccgcttaccttatgccttaatggcggtggtggtagggatgtcgctaggactggcgggggcagaaatgcaaactattctaaataatccgttagcaagcccatttaccctcggtttatcaaatgcagcttcatttggtgctgcattagcaatagtttcgggtattggtattccgggtattcctgaccaatggtttatttcagcgaatgcatttctctttgcactcttatccgctttattattagacgcaataacgcgttggactcgtgttcctacatctggagtggtgctttttggtattgcaatggtgtttacctttaatgcattagtttcaatgatgcaatttattgcaacagaagatacgctccaaggtctggttttctggactatgggaagtttaacgcgtgcaacatgggtaaaactcggtgttatggcgggtgcctttgctgtcattatggtgatttcatggatgagttcatggaaattaactgcattgcgattaggcgaagatagagcgattagctttggtattgatgtaaaacgcttaagattaggctcattgctacggatcagtattttaacagcactggctgttgcttttgtcgggcctattgcttttattgggttagttgcccctcatattgcccgtatgatgttcggtgaagatcatcgattctatctgccagcaagcgcattaatcggtgctttagttttatcattggcgtctattgcttctaaaaatttgataccgggtgtcattattccagtgggtattgtgacatcgctggtgggtgtgccatttttcctcagcatgattttgcgtcatagagggaatatctaa

SEQ ID NO: 244 - DNA, 600 bp, artificial
  Centroid sequence
ttggcaaaaaaagggagtatttctttagataagcaaccattagaagcgtattctcacgctgcattgcgtagtggtattgcaatggtacagcaagatcccgttttattatcgggttcactgcatgacaacattacgttagggcgtgattgtgatgagtcacatttatggcaggtattagaaacagttcaactcgatcaatgggttaaagcgttaccagaagggctgcaaacaaaacttggtgaacaaggtagtcgcttatctgctggtcaaaaacagttacttgcattggcgcgtgtattattaatacctcctcgtattcttattctggacgaggcaacagcaaatattgattcaggaacagaacaagccatacagaaagcgttaaaagtagttagggaaaaaacaacattgattgttattgctcatcgactttccactattattgaagccaatgaaattgtagtacttcatcgtggtgcaattgtcgagcagggcgatcatgctaagttactctcgcaaaaaggccgatactataatatgtatcaattacagcaggtcagagaatctttacaagaacaaactcctcttgaagtagaataa

SEQ ID NO: 245 - DNA, 399 bp, artificial
  Centroid sequence
ttgaaactgattttcaggcaaaaaaatagccatttcccacgtagtacaccagcaaaaaatgaagaactcgttcgtacctttattgaaattgatggtcgtcgtcatgaacttgctttgccagctcaattattatcattctctgcggtaataccaacagcaatgaatgccagtcatgagaaagaagagaatgaaaaagcagttattgcaccaatttctggtgtattacatagctggatcttatctgatggtgacaacgtcaaagaaggtgatgttattgctattatggaagcgatgaaaatggaagttcaggtggtcgcatcttgtgacggggtattacagcaaaaagccaaaacaggtgattacttttcagcagaaaccgttttagctgaaataaattaa

SEQ ID NO: 246 - DNA, 417 bp, artificial
  Centroid sequence
atgaaactaaccattgaaaaactgccgcagctttcagcacaagataaaatagatttagggaaaatttggcaagatagtgagtaccaaatggcactcactgcaccaatcaccacagagcatgctctttttgtcgcccgttttaacgggcgattactagcggcttgtcgtataaaataccaagcaaaaacagcgcttatcagtgattttatggtaagagaagtgactcgtcgtcgtggtgttgggcattacttactaacacaatgccttgaaaaaaatccaaccattacacattggcaagctttattgaaaacagggcaaatcaacgatcctgtagcacaggcttttttagcgcatcatcattttactacttcattacaggctgatacttatgattatttatgcaatgataaagcataa

SEQ ID NO: 247 - DNA, 549 bp, artificial
  Centroid sequence
atgcgttacgccgatattcaggttgaaacagaaagattaagattgcgcccttttgaaatgggggatgcggaagattggtttaagatcatgagctcacctgaagtgacgcgctactggagtcatcttccttggcaatctctgcaagaagcgcaagaagatatcattcaagatatcacccatatggaaagaaaagagtatctgcgtttagcggtgatagataaagcaactaatacactgatggggatgtgtgttttctttaatcattaccctaattcacgacgtggcgaaatcggatattgccttgatacggcttatcaaggcaggggggtgatgaaagaagctatggctgcgtttatcacgtatctccaaacgcatttatctgttcgtcgtttagaggccgatattcaccctgataataaagcttcagctgctttattagcgaaattaggttttgaacaggaagggtatcttaaacagcgttggatagtcggtgatgaggtttctgattcgattatctttggtttgttgttgcccacgaacgttgcataa

SEQ ID NO: 248 - DNA, 924 bp, artificial
  Centroid sequence
atgagccaattagaaaccgaactcaaacttagtgcgatacctgccgctattcctcagattattcagcgcattctgactttgccataccagcatacaccaccgcataaattgactaatctttactttgaaacctccgataatcagatgcgtaattgggacatggggctacgtatccgtggcattgactctcattatgaaatgacaattaaaacagcgggtaaagtagttgcggggttacatcaacgcccagaatataatgtgacattaaatgagccaaccctcgatttaacccgtttcccagcagaaatttggccggataagaccgatttaacggcattacaagcacaattaaaggttctttttcataccgattttcatcgtgaaatttggctggtggattatttagagagtcaaattgaagtggtgctagataaaggcactattcgtacagcgcaatatgaattacctattgaagagtttgaactggagctaaaaaaaggccaagtggcggatgtgattgctttggcgacttttttaggtgaacaagggggattacgacttgcttcacgcagtaaagctgcccgtggttattatcttgctaaagataagcccgcattatcgttaagtgtggtcaatcttgcacctaatgacacaatagcggaacaactgactaagtggttagcggctattcaagcgttagaagaagctatttttgctaatccgacgccaccaacacttaccatgcccgctatgctagcactgttttctgattggtgtaaaaagcagcctcagttacctgaatcaatgcagcaagcactcgataatctttcgttgttatcctttacccgcgcaacggattattatcatgtgttatggctgaattttaaattatctgcaatggcgtggttgctggctatcgcttaa

SEQ ID NO: 249 - DNA, 585 bp, artificial
  Centroid sequence
atgtattgggtaaatggacaacagcaacaaaatgtagatgccagtgatcgagcagtgcaatttggggatggctgttttacaacacttgctgttgagcagggtgatcccattttattatctgcacacataaatcgtttaaaacaaggctgtaacgctctctttttaccgcatcctaattggtttgaacttaaaaagcagatcatagatatcgcctcacaggttcaaacaaaaagtgtgattaaaattattattagtcgtggttatggtggacgaggatattcttccaatggatttataacaccgacggtaataatgtcactgtcatcttatcctacccattatctccaccagcaacgtgcaggtgtatcgcttggtataagtcctgttactttagggcaaaatcctttattggctgggatcaaacatctcaatcgtcttgaacaagtccttatcaaatatcatttagaaaaaacagaatttgatgatgttttagtgtgtgataatgaaggatatttagtggaagcgaatgcggcgaatcttttttggcgcaaaggagataggcttttttacaccaaacctgactaa

SEQ ID NO: 250 - DNA, 1578 bp, artificial
  Centroid sequence
atgaatacatcacttgcattctcatttaataccaaggcaacgccactgccttatcacagagaacccgctttgcttttcaatacattatgtgaaaatcaacattacacattattgttagaatccgcacaaatcgacactaaagcgaacttaaaaagcttattaattgttgatagtgcattacgcatcagtgcagtaaaaaatcaagtcactattgatgcattaagcgttaatggacaagcgttattgcctgcattaaaaatcgcactaaaagaaaaagctaatttgacgtcagaaaacgacaaacagtgtgtctttacttttgcaacgccttcacaagagaccgatgaagaaagcaaattaaaatctgctagcgtatttgatgcgttacgcttctttcttgttaataaagatactaaagatgcaaactttatctttgttggtggcttatttgcgtatgacttagtctgcggatttgaatctattcctgaattagaaagtgatttttcttgccctgattattgcttttatttagccgaacaattaatcgtgatcgaccatcaaaatgaagatagtcaattggtttccattgcatttaccgatgataaaacagaatgccaacgtctcactttacgacaaactgagttaatttcgctggctaaacaaccgttaaaacaccctattcgccacgctttaacagcagaaggatcaacaatacacaccaatatggatgataaaggctatggtgatatcgttgaggcaatgaaaacctatattcgtcgtggtgatattttccaagtcgtgccatctcgtcgctttcaagtagcttgcccttcaccacttgctgcatatcaagtgttgaaacagaaaaacccaagcccgtatctgttttatatgcaagatgcgctattcactgtttttggtgcatcaccagaaagcgcactgaaatatcaaaccagtgatcgacaaattgaaatttaccctattgcgggaactcgtcctagagggcgcaataccgatggttcaattaatgcagatttagacagccgtattgagctagaaatgcgtactgacaccaaagaactttcagagcatttaatgttagttgatttggcgcgtaatgacttagcacgcatttgccaagcaggtagccgttatgtcgcggagttaacaaaagttgaccgttatgcttttgtgatgcacttagtctctagagtagttggaaaattacgtgatgacttagacatttttcatgcttatcaagcttgtatgaatatgggaacgttatcgggagcgcctaaagtcagtgctatgcaattaattgctcgttatgaaaaaacgaaacgtggcagctatggtggagccattggttattttactggtgccggtgattttgatacttgcatagttattcgctctgcttatgttgaaaataatattgccacaattcaagtcggagccggaattgtgctcgactcagatcccaaaatggaagcggaagaaacccgcaataaatcacaagctgtaatcaacgctattttacaagcgcatacggatacacaacagcaggaggcttgttaa

SEQ ID NO: 251 - DNA, 594 bp, artificial
  Centroid sequence
atggcgactatcttactgctcgataacattgactcatttacttataaccttgttgatcaattacgtagctttggtaataacgtggtgatttatcgcaatagcgtcacagctgattttattgaacagaagttgcgcgaactcgataaccctattttactgttatctccggggcctggcgcaccttcacaagcgggctgtatgcctgaactgttaaaacgcgtattaggtacattacctgttgttggtatctgtttaggccatcaagccatcattgaagcttacggtggcaaagtttcttcatgtggagagatcttacacggtaaagcgacattagctgaacacgataacagtgaaatgtttgtagatctacctaaccctttacccgttgctcgttatcattcactttcaggagaacaagttccagcacaacttattattaatgcttggtgcgataacactgttatggcggtgcgtcaccgtcaacataaaacatgtggtttccagtttcacccagaatcaattttaaccaccaaaggcgcacaacttttagaacaaacaatcgcatgggcattaactcctaaaggagacgcataa

SEQ ID NO: 252 - DNA, 510 bp, artificial
  Centroid sequence
atgataaaagattataaacgttggatagtactacttttggtatcgagtatgctgtttctcattgttgttgatgtcacagtgctttataccgcattgccacgtttaactcatgatttaaacgccagtgcatcagaaaaattatggataatgaatgcttacccgttaattgttgctggattactacctgcagcgggtatgctcacagacaggattggccataaaacactctttatttgtgggttaccgctattcgctctcgcttctttgtgtgcagcattttcacccaccgcaacgaccttaattgcctctcgtggttttttagcagttggagccgcaatgagtatgccagctactctgtcaatagtgcgccaagtctttagcgactcgcaagaacgcgctattgcgattggcatttggtctgcggttgcttctggcggtgcggctttagggcctttaattggtgggatgttgcttgaacattttttggtggggctctgtcttcttaattaa

SEQ ID NO: 253 - DNA, 2451 bp, artificial
  Centroid sequence
atgagtcatggagcctgtgtgcatttattgccaatctttgatgtaacagaaaaaatcgttactgcgttaaaacaatccccacaagttttgcttcatgcacctacaggtgccggtaaatccacggcgcttcctctctatttactggagcaaaattactttgatggcaaaataattttattagagccaagaagaatagcggctaaaagtattgcttatcgtttagcaaatcaactcaatgaggaagttggaaatacggtaggttatcgtatgaaagcggaaagcaaagtcagctcaaaaactcgacttgaagtggtaacagaaggtgtattaaaccgcatgttacagcaagatccagagttgactggcgtaagccttgtaatgttagatgaatttcatgaacgcagcttacaagcggatttagctctagcgctattgcttgatgtacagatgggattacgcgatgatttgcgtgttttgattatgtccgcgaccttagataatcaaaaaattacctcactactacctgatgcccctatgatcagtgcgcaagggcgcagttatcccgtcgaaagagtgtattttcctatcaatacgcatcaaccctttgaacaagaaattgccacaatggcgttgcgattattggcgcaagaaaccggctctatgctgatattcttgccgggaagtgcagaaatagtacgcgttgcagatattctaaaagataaagtggatgacaatattttactatttccactttatggcgccctttcattagcagaacaacaaaaagcgattgaaccgactgaaaaaggttatcgaaaaatcgtacttgctaccaatattgcagaaaccagtctgactattgaaggtattcgcttagtccttgatagtgctattgagaaacgcgctcagtttgatttaagaagcggtgtcactagcttagtgcgtcaaaggattagccaatcgtcacaaacacaacgagctgggcgagctgggcgtcttgaagcaggtatttgctggcatttaatcagccaagagcaggcagagcgtgttgcttctcaccaaatacctgaaattttaactagtgatttatcgtcgttatggctttccgtcttgcagtggggatgtcgtgacattaatcaattgagttggttggatacaccaaccccacaagcattgaatgcagctaaagatttattgtatcgtttaggcgctattgataagcaagatggattaacaccgcgtggtttgcgtatggcgcaatggggaatagaacctcgattagccgcgattttagattatgcgagtgagcaaagtgacaatcatcttgcgacggcagcacgcttatgtgcaatcttagaagagcctccacgagggcaggaaattaatctagaacgggtttctcaacaaaaaaatatgttctggacacgacgtgaaaaacagctttctcaacatcggaaagggattttttgtcctgaattattaggttcattattagcagtcgggtttcctgatagaattgctaaaaatcgtgataatcaaggtcgttttcgtttagccaatgggcaaggtgccatgatggatgatgcgcattctatgagtaatgcacagtggatcttagcgccgttattactacaaaatgtacattatgccgatgtgcgcattttattagcgctacccattgatatcgatgaaatatcagctatctttcctgatcttattgaaaataataccacggttgaatgggatgaaaaacgaggtacattagttgcatggcaacagcgtcaattagggcgattaactttaagccagcgacaattagacaaacccaataagcaacaaatgcaacaagcattattgaattggttgagagataacggtttaaaggctttagcgctgaatgaagagactcaacagctttttattcgcctttctttagcgaaaaaatggtgtccagaagccttattacctgatttagcagaaacggtgttacttgaaactttagaaacatggcttttgcctgaattgggggaagttcagacattaaaagcattacaacaaattgatattaatacaattattaaaaaccaattaacgtggcatgaaaatcagttactacaaagtttatttccaacgcattatttagcaccaacagggacaaaagtggcgatccaatatgatttagagttaccgccagtcattgcgatccgcattcaagaagtttatggcgaacaacaaagccctattattgcgaatggtcaattgcctgtagtcatggaattattatcaccagcccatcgtcccatccaaaaaacacaagatctggcgacattttgggctggaagttataaagaggtgcaaaaagagatgaaaggacgttaccccaagcatttatggcctgatgatccggcgaatacggcaccgactcgacgagtaaaaaaatatagccaataa

SEQ ID NO: 254 - DNA, 255 bp, artificial
  Centroid sequence
atgctggcagatagagacgccttttatcgggattttgcattgcaatttcagctagatgagcattttggtaataacttagatgcattatgggatgtgttaatgggagaaattgaattgccagtcagtattgtttttaagcattttcctcattattctcgtgattttcaacctttggtggaattgatgcaagaagcacaaaatgagcttggtaaagacgtattgagctttcattgtgagcataaaatacaaaagtaa

SEQ ID NO: 255 - DNA, 1428 bp, artificial
  Centroid sequence
atggaaaaacattttctaaaatatcttatgatccccgtcgctttactgacattgaatgcgtgtagccaacgttcgtcattaccaccagcgacacaaccttctatgttaaatcaacagaacagtgtgcctgaattaacacaatggcctacggcattaagccctaatgtaagcaatacaagaacactgtttgataaatatgcctcacaaatttatcaaaaaagtcatcctcaaggcatggttattgtcatgatcaataactctcaaaccttgaatcgttcttttgggacaacaacacctgaaagccgtaatgcaccatccatgaactcactgatccgcatcgcgtctatcacaaaactgatgacgagtgaagtgatgttaaagttacaagatgatggaaaattattagtcaccgatccactgcaaaaatatagctactatggtgtagacatcccattagttagcgctcaatcccctatccgtctttatcatttagcaagccataccagtggttttccacgagaacaacctggcggaaaatggggaagacctgtttttatttggccaactcatggcgaccgttggaactggttaaaaaaagcaacattaacatcgcctgcgggtaatcaagctgcatattcaaatttagcgtatgacttattagcagatgccttagtgaaagcatcaggtaaaagttatcctcaacttttacaacaatatgtcactcagcctgccggtatgactaacacaacattgacgccaacccctgcacagtgccaaagattattaataggatataaaccaagcccatgttctgacactattgctgcagccggaagtggtggtgtgtactcgacgcctgccgacatgcaacgttggatgcaaggctttttgacttctcataatgccatgcgaaaagcaacggcaagcaaagagcaatctgtctatttccctcgtaatcgactctcttcaatagaaggaatggatgttgcgggtcgtgctgatggtgtaggtttaggttgggtttatatggctcccgccaatggaattccggcgatttaccaaaaaaccggcggcggtggcgggtttaatacttatatggcaaccattcctgaattaaatatcggtgtatttgtggtgatcacccgtaaacctaatggcactaaatttagtgaagtgactcaggggactaatgcgcttgttcgagcactagcaaaagattttttatcagtgatcgcaaacacgatagcgataaaaaaagcgccttacctaaggcgctttttgtttttctggctgaagtggatattacctagcgattacgcctcatcaataaccatagactcaatgttaggaataatattgctggtactaatgctgcaatcacggcaggtataccataaaccaaacttaatcgtcctgaaacttcattga

SEQ ID NO: 256 - DNA, 1569 bp, artificial
  Centroid sequence
ttgcctgttaacttgtctcacttacttgtcgaactctcctctttaaaagagacgctcgcattgtatgaatccgttaaacaagcggatattgctgctattgaagatattgtacccgcagcgaaaacgctcttaattcactatacaccgtggctaattacggctgaagaacttgttgttcagctccgacaattagaaatcaaagcgctatcagcacgtcaaacacagtcattaacgatccctgttcattatcaaggtgaagatctcaatgaggtcgctgaattattagggatcactaccaatgaagtgatccgcagacatacagaacaaacctatcaagttgcattcactggttttgcaccggggtttgcttatctgatcgctgatgaaacccagctctatgtacctcgtcgtaaaacgcctcgtacacggatcccagcaggttctgttggattagccggtgaatttagtggtgtgtatccacaacaaagtcccggcggttggcagttaatcggaacgacggaaataaaaatgtgggatctttcccgcgaacaacccgcctttttattaccgggaaatgaagtgcattttattgatgcacaaaaagcaccaataaccgtttcattgcctgaaaaaaaatcggcagtagctccccctctttcattaaatgatacaggcttatatgtcatttcggcagggttacagacattatttcaagatgaaggacgaattggtgctgcatcaatgggggtttctgcttctggtgcactagataaacccgctttacatgcggctaatcgtttagttgggaatccgacaaccttcgtggcacttgagataactcaaggtggattaacacttaaagcgcgacaagattgtgttattgccttaactggggcggattgttctattttactaaaacatgagtcgggaaagagtgaatatctatcaagctatcaaccaattgatgttcgttgtggtgatgaaattattttaggtataccaacaacaggggtacgtagctatcttgctgtgagaggtgggtttgaattacctaaagttttaggtagtcaggcttttgatactttagcgcaaattgggcctagtgcactgcaagaaggagatgtccttcatctgaataatgaaagcatttcaaacggtattgtagccgatgaacagccaacatcagtgctgccaaaacaaggtgatattgtcacacttgatatcgttttaggccctcgtactgactggtttaccgcggatgcaataaagacgctaacctctcaattatggcaagtcacaccacaatctaatcgtattggtttacgtttattgggcgaaacgccccttgcgcgtgagcaacaacaagaattatcaagtgaaggcacctgtattggtgcaatacaagtaccaattaatgggcagcctgttttgtttcttaacgatcacccattaacagggggctatcctgttattggtgctgtcgctgaatatcacttaccactcgcagggcaaatccctgttaacgctaaaattcgttttaatccaattaccgaatttcaagaatattga

SEQ ID NO: 257 - DNA, 714 bp, artificial
  Centroid sequence
atgttttttatcagccctgtcttattggttttttctttattcgctcattgttggaaaactgatggcatgttgattactttgtctcttttaattcttgggttgatgttactcgtttatgcatcagaccgattagtttatggtgcgagtgtttttgcgcaatcgttaaaaatcccccccgctgttatcggtatcttaattgttggtacagggacttcactacctgagctttttatttcaacggatgccgcagttcataatttacctgatatcgctatcgggacagctattggctctacactcaccaatcttctccttatcgcgggtattggcgcaatgatttaccccatgagcattcagtccgcagtgctaaaaaaagagcttccattgatgattatcgtcatcatgctcgttggcattattgtttctagcggagagctagggcttagagaaggcactctgctcttttttattggttttgcatccatttttctcatgataaaaacaatgcataaaacactaacacaagagcgccacgtgttacctttagaaaccttaacgcgttttgaattacagacaaatccccgtaattctgttgcccttttttgggttgttattgcgttactgattattccagttgcaactcaaatgatattagacaatgtctttattctaatgcaacagtatcattttagtggcttttttttgttggtttaa

SEQ ID NO: 258 - DNA, 948 bp, artificial
  Centroid sequence
atgcctaaaaaggtatttattgctttagggggaaatgcattaggaaatacgccactagagcaaaagcagatagtacgaaaaaccgcaaagcccattgtggatttggttgagaaaggctatcaagtcattattggtcatggaaatggcccacaagttgggatgatcaatttagctatggattatgcatcacaacagaacattggcacaccgtatatgccatttgctgaatgtggtgctatgagtcaaggctatattggctatcatctacaacaggctattaatgacgaattatgtacgagaaatctcaataaaaatcatggttgtgccaccattgtgactcaagtggttgttgataaaaacgatcccgcttttttatcgccaacaaaacctataggggcgttttatactcaacaacaagctgaggcgattcaaaaagaacatggttttcactttatggaagatgcggggcgtggatatcgtcgtgttattccatcacccaagccgttagaaattgtagaatcaccaattattaaacagttagttgaacataatatcgtcgtgattactgttggtggcggtggtattcctgttattcgaaaaggggatttattagaaggtattgatgctgttattgataaagataactctagctcaaaattagctgtagaattaaaagcggatattttattaatattaacggctgttgataaagttgctattaattttaataaaccagaacaaataaatttagataaattaacactttctaaagctcaggaatatatttctcaaggacaatttgctaaaggaagtatgttacctaaagtggaggcctgccttaattttttaaaagaaagtgaaaaaggtgtacaagcgattattacttctttagagaatgcattatctgctttagaaggaaaaacaggcacaacaattatttctgattaa

SEQ ID NO: 259 - DNA, 897 bp, artificial
  Centroid sequence
atgggtgcaggccacgagcacggtgatgtcaaagcgctacctgaatcacgtctgttaattgcttttgcattaacaggctcttttatggtgattgagtttattggtggctacttaacagaaagtttagccttgatttctgatgcaatgcatatgatgacagatgcatttgcactcttacttgctcttatcgcgatccacgcaggtagaaaagcagcagatctattcagaacttatggctatgctcgttttgaaatattggctgctgcgatgaatgcactgatcttaatggcggtggctttttatattctttatgaggcttatcaacgactctcttcccctcctgacattcagtctatgggtatgcttgttgtggcaatcgcagggcttatcattaattttatctcaatgaaaatgctcaccagtgcaaaagatgaaagcttaaacgttaaaggggcttatcttgaagtgtgggcggatatgttaggctcagtgggcgtcattattggggcggtaattatttggctaaccggttggcaattagttgattctattattgcggtattaatcggctttatggtctttccgcgcacatggatcttattaaaagagtgcctgaatattttattagaaggcgtgcctaaaggcattaatttaactgaggtaacagacaccattaataataccgcaggggtggctagctcccatgatttgcatttatgggcactgacgcaaagcaagttgatcctcagtggtcatattgtctatcaacccaatgtagatagtgaaacattacgccttgctattgataagcaactacgtgaacaatttcatatcaatcatattaccttacagatggaaagcgaggataaacaacatctggaagataatcatcattag

SEQ ID NO: 260 - DNA, 462 bp, artificial
  Centroid sequence
atgatggcgctacgtatgttgggctataacaccgacacttatactggtgcatggtggttattgtatgtcatgttattagtttgggcggctgattctggcgcttatgctttcggacgtttaatcggtaaacataaaatggcgcctaaagtatcaccaggtaaaactctcgaagggttagttggtggcttgattactgctggtgttgcatcgtggttgtttacttatttttcaccagtgactgaagtaccggacaacttgttattaatatctggcgttgttgttatcgtatcggtatttggcgatcttgcagaaagcatgtttaaacgtgtttctggtattaaagacagtagccaattgataccggggcatggcggtgtacttgatagaattgatagtttgactgcggctatcccagtctttgcaggattggtctttctgatttcttctggctttaaactataa

SEQ ID NO: 261 - DNA, 171 bp, artificial
  Centroid sequence
gtgagagcaacgctagctttttctggtgttgaaagccgagtaacgaaaggcaatgatggctggatccgcgtattatcaggcccttacagtaaagaacaagctaactccgtgagtaaacaagcggctggagcgggtgtatcaggttgtattcttcgctcttctgggggttga

SEQ ID NO: 262 - DNA, 978 bp, artificial
  Centroid sequence
atggctaaagcaaaaagttcccgtaaatcaaagccaacgccaagtgcaaaaaccaaggcgctaaaagggggaagacgcgaacagtggcgttatgcatggcgtaacacgatggcagattttttacgtcagccgctctcctcttttttaacggtaatggttgttgctatttctctcaccttgcctagcatcttttatattgtgtggaagaatgtttcaactgcggcagaacaatggtatccaacaccgcagttaaccgtttatcttgataaatctcttgatgattcattagctgaagccacaatcaagaagatagaagctttagataaagttgagaatgttaactatctttcacgacaagattcgctagtggaatttcgttcttggtctggttttagtagtgcgttagatatgttagaagagaatccattacctgcggttgcgattgtgacaccagttatggagcctagtgatcaacaattgatggtgaatttgcgtgatacagtagcgaaaatacccggtgttgatgaagtaagaatggatgatagttggtttactcggctttcaacgttaacttcattagttgggcaaatcgctttggtcattggtacattgatggttgttgccctgttgctggtaattggtaacagtgtgcgcctcaatattttcagtcgacgcgataccattaatgtgatgaagctaattggtgcaactgacggttttattatgcgtcctttccttaattggggattgatccttggttttattggcgccgtattcgccctaattttttcagctttactggtgtggaaactctcagatgtggtgactcaagcggcgaccgtgtttggaacgtcattttccatctcaggattaggctttgatgaatctatcattcttattcttgttgctatgataattggctggctggctgcatggttgacgacaatgcaacatttgcgtcaattcacacccgaataa

SEQ ID NO: 263 - DNA, 663 bp, artificial
  Centroid sequence
atggttcgtgctagtatggctacaaggaataaaaaagatgttacagcaattcataatactgattcacagatcaataatgaggtgaatatgggcaaattccctggcttacatcgtcgagcaatactcgttattgctattgctttattggtcgtgtttttttggccaacaagtgagaataatggtgagccgcctcaaccgtcatcatcgacgcatgatcttcctgtaccaatagcgcctaccaatgatccggtgtatcaagcaccgatccctcaagcacaagatagcttaaatgccgatccagaggtttctccatcaatagataacccaacggaaaatgatcccgagggaacggttgctcaaacgacgccaccacaagacactcaatcaacaccagcgcaaaaaacatggcaaacctacactatcaaagaaggacaaaccttagcgcaactttttagagacaatcaacttcctgtcaatgatgcattttctatggcgaaatcagaagaccaacaaaaatcattaagccaattacgctcagggcaaactattcgtttacagcgcaatccgcaaggtgatgttagcatgctagaagtgacaaatagcgccggtactgttatcacttacactcgtttaagtgatggaagttattaccgtacaccatag

SEQ ID NO: 264 - DNA, 669 bp, artificial
  Centroid sequence
atggaacagcatttgctgttacttgatccggcaaatccagatcaagaacagttgaatgcaattttccgtagtgcacactccataaaaggaggagctgcaacatttggcttcgttaaacttcaacagaccactcatgtgcttgaaaacttgctcgatagtgcaaggcgtcatgagatggcgctcaccgacgacattattaacctgtttctggaagcgaaagatattatgcaacagcaattggatgcacataaaaactcacaagaacctgatgaggaaacatttaactatatttgtgagaagttgcgtcagctggctctcgatgtaaaagaagaacaatccgctcctcaagttgaggctgttgctggatctgaagcttcggactcacaggccacaatgattgaaactcctgttttgtcatctgacgctgaaaatgtgcaaagtgaagccgtagaaaacagagttgaagtcgcatcgacaatggcagctgatggacattattaccatcatatcattttgtctgatctgaaagagacagatattgatttaatgctcgatgaattaaagcatcttggtgaagttagccaagttgaaaaacagcatcatggccttgaagcaatattaaaactactgcaacagaagaagatatcagcgctgtactttgttttgtga

SEQ ID NO: 265 - DNA, 483 bp, artificial
  Centroid sequence
atggcaatgaacggaataatcacaaagtggtttgaagataaaggttttggatttattaaagatgaaaacggggataaccgttattttcatgtgattaaagttgccaaccctgctttgataaagacagatgcaaatgtcacttttgagccgaccaccaataccaaagggctgtctgcgtatgcggttaaagtgatcccagacagcaaatacgtttatattgcaggtgagcgaattaagctaacatctattaaatcatttcgaatttatagtgaggaagtatccgcagatacgcatatcgataaagaaaacacggtactttctgtcgggactttaatgaatagcatcagaccaaaatcagcggatggtgctaataatatgcgtactttgagaaaactggcgatcatgacaatgcatggaacagagatagtttttactgaagatgaactcgatatcgatgaaacagtaaaagcgctcaaactgtaa

SEQ ID NO: 266 - DNA, 507 bp, artificial
  Centroid sequence
atgataaattacgatgaaatgacccgtctaagtattgaaatgggtaaagtgttacttgaaaagaagcgtacgataacaacagctgaatcttgcactggcggatggattgcgaaagttatcactgatattgcaggaagctctgaatattatcagcgtggctttgtaacatatagcaatgaagcgaagcatgaaatgataggtgttgatgagcaaaccttgattaaatacggcgctgttagcaaagaagttgttcttcagatggcgaaaggcgcacttagcgctgcaaatgcagattttgctgtttcagttagtggtattgcaggccctggtggtggtagtgaagaaaaacccgttggtttagtttggtttggctttgcaatgaaaacatcaacaggtattcaaactacggcaacacactgtatattcagtggttctcgagatcaaataagagctgaatctgttattttttctttaaaatcaattcttaaagaaattattaataattaa

SEQ ID NO: 267 - DNA, 2943 bp, artificial
  Centroid sequence
atggcaaaaactacgctactcgcattacaagggctttcatgctcccactgtgttaacagtgtaaaaaaagcacttgatgctcgcaatgatatagaacagtcatatgtgactattcaatacgctaaaattgacagtgatgcaactgctgaaagtttaatcaaaacaattgaagacgcaggttatgaagctaaaattgcaacacaacctgatataaaattaagcctaagtggccttaactgcatgaagtgtgtcggtaaaaccgaaaaagcattattagccattgaaggtgttgtcgccgttaatgtaacaaaagagtcagctgaaatttttggtgacgcggctgcggatactttaattgcagcgattactgctgaaggttttcaagcaaacttagcaccaactgacaacatagttcatctaacactatctggtttaaattgtggtcattgtgtcggctcagtcaaaaaagcacttgaagcgacaacaggcgttgatagtgctgaagttgaattaacacacgcaaaagtaacgggttctgcaaccgctgaaaccttaattaccgctgttacagaggctggttacgaagcacaactagcgcgtactgatttcccaaaaactgagccgctgacgcaaacgcatgcacaactggaagcatcgtcagcggctgtttgtgatattccagtcgagaatgctgatattgataatggcgctgaaatcaatactgacaatgacaacagtgttcagcttttaattgatggtatgacctgtgcaagttgcgtaaacaaggttcacaacgcattacaatccgttgatggcgttgaaaatgtgcgtgtaaaccttgctgaacgtagcgcattagtgacaggtgaaatcgatcatgatgcacttgtgtctgccatcgaaaaagccggttatggtgctgaaattatccaagacgatataaaacgcagagaacgtcagcaagaagttgctgttgccaatatgaaacgttttcgctggcaagccgcattagcgttaattgtcggtattcctgtgatggtttggggaatgatcggcgataatatgatgcttactgaagctaaccacagcatttggttaggcattggcattacaacattgtttgtaatggttgttgcagggggacatttttatcgtagcgcatggcagagcttaaaaaatcgtagtgccacaatggataccttagtggcattaggaacgggtgccgcatggctctattccattaccgtaaatttatggcctgaaatttttccagctcaagcgcgtcacctctattatgaagccagtgcaatgatcatcggtttaatcaatctgggtcatatgcttgaacaaagagcgcgtcagcgttcatctaaagcattagagcgactattagatttaacgcctccaacagcaagagttatcactgaaaacggtgaagttgaaatgccattggctgatgttaaacaaggaatgacattacgtttagcaacaggtgataaagtacccgttgatggtgaaattatccaaggtgaagtgtggatggatgaagcgatgttgacaggcgagcccattccacaacaaaaagcagtgggtgacactattcatgcaggaacaacagttcaagatggctctgtattatttaaagcagcagcagtgggaagtaaaacaacacttgctcgtattattaaattagttcgccaagcacaaagtagtaaacctgaaatgggacagctagcagataaaatatcaagtgtgtttgtccccattgtcgtagctattgctcttattgctggtgctatttggtatttctttggcccatcgccgcaaattacctatgccttagtaattatcacaactgttcttatcatcgcttgtccttgtgctttaggtttggcaacacctatgtcgattatttcaggtgtcggtcgtgcggctgaatatggcgtgttagttcgtgatgccgatgcactacaacaagcaagtatgctagatactttagtgtttgataaaacagggactctgacagaaggcatgcctcaagttactgatattcatacttttaatcaagtagatgaaactcaagctctggcattggctgcctctttggaaaatggttctaatcacccattagctaaagctattttaacgcgagctaaaggaattgatttacctgaagtaaacaagtttcgcacattagctggcatggggttaagtggtgaaattaatggtaaaacagtacttttaggtaatcctaaattgatggttgaatcaggtattgatattagtgacgttaattcattgattgattctcaagccgccaaaggtgttacgcctgttttattagcgcaaaacggtaaaattgcggcattactttctattcgcgatccactcagagaagatactgtaagtgcattacaacgtttacatcatcaaggttatcgacttgtgatgttaacgggagataacccaattacagcaaatgcaattgcaaaagaagccggtattgatcaggttattgcgggtgtgatgccagaaggtaaagcacaagctattactgaccttcaagctgaagggcgtcgtgttgcaatgatcggggatggtattaacgatgcccctgcattagccaaagctgatgtcggcattgcaatggggggtggtagtgatatcgctattgaaacagcagctatcacgttaatgcgtcatagtttacatggtgttgctgatgccgttgaaatttcaaaaggcacgctgcgtaatatgaagcaaaatctatttggtgcttttatttacaatagtttaggtattcccattgcagcaggtattttatacccattcacgggaacattattaaacccagtagttgcaggtgcagcaatggccttatcctcaattactgtagttagcaatgcaaaccgcttattgcgttttaaacctaagcaataa

SEQ ID NO: 268 - DNA, 1044 bp, artificial
  Centroid sequence
atgggagtaggggcattagtcgttcctttcttacagtcttacattcaagtacgtaaaggactgttagtcgcaatgttgatgcttcttattggctcattttctcgagcttatgtttctgatggcaatcagctattattgaccgccctcttctgcggtttaagtgtcgcttatattcaagcggtatttcctggcattattaaaggatggtttggaaatcgaacgcctatcatgatgggactatattccgccatgttaatgggaggaggcgcactaggtgctcaactttcccctattcttaccgcccctgatggtcattggcaaaatgctttagcatggtttgcacttcctgctggttttgcatttgttgctattcttttttctattaaaaatagcgccacctctgccaataaaatatcactcaataccttaatctggcgtcctagaacagggttacttatcttagggtttggttgtgttaatgcaggatatgcttcagtggtaacatggctagcacctttctatcaatcgttaggaatgccaagcgcccaaagtggctctctagtcgctatcctttccctttttcaagcttctgccgcgttgattattcctttcttagcggctaaaaatcacgacaggcgtttttggcttacaataacattaataagccaatttatcggttttgccgcaatcatgacgatccccatgagttcgccttatctttggagtattttcttaggctgtggcttaggaggatgtttttccatgatgatgattgtcgcgcttgatcatattccagatccagcgcaagcgggtgctctgtcagccttaatgcaaggtggtggctttattattgccgcttttggcccattagttgctgtgctattacgccaacctgatggaagctttacttatgcatgggcatttcatgccattttagtgattattacgataggattatttgcacgattaaaccctcgccattacgcaaagcctatcccgccaatcattctatttaatcatcataaaaatatacacataaaataa

SEQ ID NO: 269 - DNA, 1404 bp, artificial
  Centroid sequence
atgtcttcgttgttaaatacttattaccgagcaaatgaatcttggcagatcgctataacccaagcattacccccttatatcgatccggttattatccgttggttggagacatcccctgatacccttgttcatttaacacagatatatggttcaccccttaatattgtctggcctcatactgtggagcagaacgttaatgccatggtcgaagtcgccaaaacatttggtatacaaaccaatttgtattatggggttaaagtcaataaatcacagtcattattacaagccgctgttgctgcgggaactggggcggatgtatctagcctatatgaactcaacgatgctattcgtgcgggatgtaaaggtacagagttgtgtgctacaggccctgccaaaacaacggcatttttacaggcgttaatagtgcaaggggcacggattgttattgattctattgaggaaatggacgagcttattcaccttgctacaaggtggataagtccatcaggacgtataagtatactgctgcgttttcgtcctgagtctaatcatatcagtcgttttggtatgttatccgctgagatcatgacagcgcttgagaaacttaattatagtgaccaagtaaaggttgatggattccatttccatcttagtggttactcttcggtatctaggatcaaagctttttttgataccttacccttgattagctacgcacgtgctttgggttactccccttatattatcgatattgggggagggttacctgttcagtatgtagacagtcattgttataagaaatggctctctacgcaaacacataaagactatcgtactcgacgaattcctgattctttctatccatatggtggagagataaatgcccaaggctggctcactgagtttctaaccggagtcgatcccacaggtaaaagagtttgtgatgcattaattgaggaaggattaacactttgccttgaacccggaaggagcttggttaatcaaagtgcgatcagtgtatttcgtgtctgtcgagttcgtccatatgatcatgtcggacatgttatttttgtcgaaggaactagttttagcgcatgtgaaacgtggtttaattctgaattcttaagtgatcctctccatatttatcgaaataaccatcagccactttcttctgctggaaatgcttggattgcaggccatagctgtttggacgacgatgttatcaccaatcgtttgatcgcttttgcacacctaccaaagccaggtgatttactgatatttgctaataccgcaggttaccaaatggatttactggaaaatcaatttcatcggcatccgttgcccacaagattaactgcggtcataaactcacatcaaaaacctatatttaccattgataattaa

SEQ ID NO: 270 - DNA, 363 bp, artificial
  Centroid sequence
atgggaaatccccattgcgtcattcaggtcgaagacattaaaacagccgaagttgagttgttaggacctgtgttagagcaacatgaacgttttcctgaacgtgctaatattggttttatgcagattgtagacagaaacaaccttcatttacgggtatttgaacgaggtgcgggcgaaacgaatgcctgtggtagcggagcttgtgctgctgttgctatcggtatttcacaaggtttattagataaacgagtgaaagtgactttacctggtggtgtactgctaattgaatggaaaggagagggtaactctctttatatgactgggccagcgacacatatttatgatgggatcatccagctataa

SEQ ID NO: 271 - DNA, 2013 bp, artificial
  Centroid sequence
atggcgataaatttattacctcctcagcttgcaaaccaaattgccgcaggggaagttgttgaaagaccagcctctgttgttaaagagctgctggaaaatagtttagacgcaggcgcgacctcgattgatattgatatcgataaaggtggcgctaagctaattcgtattcgtgataatggatgcggtatcaatcgtgatgatttgaagttagcacttgctcgccatgcaactagcaaaatatcaactcttgacgatcttgaagccataatgagtatggggtttcgtggagaagcattagcgagcattagttctgtttcccgtttgatcctgacatcgcgtactcaagatcaagaagaagcatggcaagcttacgcagaaggcagagatatggcagtcaccattaaacctgccgctcatcctgtgggaagtacggttgaagttcttgatctgttttataacacgccagcaagacgtaaatttttacggactgaaaaaacagaatttgcacatattgatgaagtgattcgtagaattgcgttatcgcgttttgatgtcactatcaatcttactcataacggcaaacgtgttcggcaataccgtgcagtaaaagatgaaagtcagcaaaatcgccgtttgagtgcgatttgtggtaataattttgtcaatcaatcaatgcagttatcgtgggaacatggtgatttagcaataaaaggttgggtagaacatcctttatcaccagtgcaaagtagtgaaattcagtattgctatgtgaatggacgaatgatgcgtgatagattaattaatcatgctattcgccaagcttacgaaggttatttgcaaggagaacagcaaccttcttacattttgtatttaagtgttgatcctcaccaagtcgatgttaatgtccatcccgctaaacatgaagttcgctttcatgaatctcgcttggttcatgattttatctatcaaggtgtgttgagtgttttacgacaagcaacccaagaacctttatcattagcttcagatgatgaagaagaacacgaaacagcgttaaacttccctgaaaatcgtcaagttgcaggtgaaaacgtattttctcagccttatcaagcaccaatagctcaaactccgtcaaatcgatcatcatcacaccaatacagtgaacgagagcacaacagtaactcacatcaaaagcaagcctctcaatttggaggtcgccatcagtttggtgaaagttatcagcggacacaaggtgcgctttatcaaaaaatgatgcaagaaagtgtatcaacatcaaaagataaagaaaaaatacccctatttcctgagcgtgccccattgaatttaggtgaaatcgttcatacaactaataatatcgaagaagatactatttcggtgatgcctcgttccgtcaatgcgaaagatggacaaactgattatacttttgggcgagtattggcaatttatcagcacaaatatgcgttaatagaatcttcacaaggtcttgggctattatcattggaagaagcggattttctgttaaaatgtgcgcaattactgcctaaagatgaaacattgaagccacaacctttgctagtgcctttaaagttggcattgagtaaagaggagattagtgtattcaatcagtttcagtcgctaatcagtcatttcgggatcgttatcgaaatttctcacggtaaagcaacaatacatgcagtgtcgttacctttgcgtcagcaaaatttacccgtgttactgacagcattattcgcttatttgtcagcagagcaatcttgtaccgagcaacaacttggacagtggtttgcaaaacaattaggggcagagcagacgcaatggtcgcaagctcaagcagtaggactattggctgatattgaaagactctgtcctcaatatgtcagacagccagccaaaaacttattacaattaattgatttacaaccggtggtagtggcattaaataatgagcgaagtgaacacgcaaataaaacctaa

SEQ ID NO: 272 - DNA, 1488 bp, artificial
  Centroid sequence
atgagctatcaggtacttgcccgtaagtggcgcccacaaacttttaacgatgttgtcggccaacgtcatgtgttgacggctttagctaatggtcttgatcatcagcgacttcatcacgcctaccttttttctggcactcgaggtgtcggaaaaaccactattgcccgattatttgccaaagggcttaattgtgaaacaggtattacgagtaaaccttgtggtcaatgcgcaaattgccttgaaatagaacaagggcgtttcgttgatttaattgaaatcgatgctgcatctcgaaccaaggtagaagatacccgtgaactgctggataatgtgcaatatgcgccagctcgtggccgttttaaggtctacttgattgacgaagttcacatgctttctcgtcacagctttaatgcgttactaaaaacattagaagagccgcctgagcacgttaaattcttattagcaacaacagatccacaaaaattacctgtcacgattttatcgcgttgcttgcaatttcatctgcgagcattagatattgaccaaatagcaacacaactcgaaaaagtgcttttagcagaacatattgaaaatgatgtaagagcacgtcaacttattgcacgtgctgctgatggcagtatgcgagatgcattaagtttaacagaccaagccattgcaagtggcgaaggtgtcgtcagtacggaagtggttagccaaatgcttggcactattgatgacgctcaacctttagcattgattgaagcgttggtaaaagcggatggtcaacaggtcatgtcgctggtgaatgaagtcgcttcaagagggactgactgggaaaatttcctagtggaaaccctctcattattacatcaaattgccatgttgcagttattacctagtgaagaaaatcctcaagagcaatttactcaagagcgtctacgtttattggctaaatctgtttctccacaagatttacaactctattatcaaactttattagtcgggcgaaaagaactggcttatgcaccagatagacgcatgggggtcgaaatgactctgctacgtgcgcttgcttttcatcctaaaacagtgattgatgaaataccttcagcgccattagcacaaactctaccttcagcatcattacctacgaatagaatgtctgaacattatgctccgcaaactgtacagactcactcgccccaaatggctcaccaatcttcttcgcctatagaaaagagtgcgtcattaggtaacagcccagcagcgcaacttttaagagcaaggcaggcaatcaaggggacggaacaacaaaccccgccaaaaaagtctgaaccggcgacgcctaatcgggctaagccggctgctagtgcattagagcggctagcagccgtgagtgaaaaacgccagcaagttgtgaagcgtcagactaatgcgcctgaaaaaaaagaaaaaagaagagtatcagtggcgtccgcaaaaccctga

SEQ ID NO: 273 - DNA, 597 bp, artificial
  Centroid sequence
atggaaaatcaatcggttagtgaactgttacctagagaaaaattgttactttatggcgtggaatcactcactgatattgagttattggcgctctttttgcgcaccggtacttatgaaaaatctgtattagaattggcggcttttctacttaaagagtgtggttctctttatcacgttattaatgctgattatgaaacattggggcgttttaaaggtgtcggtgtaggaaagtttactcaattgcaagctatcaatgaaatggcacagcgtttttccacaacacaatttatgtataaaaatgttttatcttcttcagaggatacaaagtattacttacaaaaactattgcattggcgagacagagaagtgtttgtggtactttttcttgataatcaaaatcaattgattgcatttgaagagatgtttaaaggaacaattaatcgtgtagaggttcatcctagagaaattgtccgtcaatcaataaaaaagaatgcaacatctattattcttgctcataatcacccttctggtgtttgcgaaccgagtctcgcagataaagaaataacagaaaaaaaatttttcttgcttgccaattag

SEQ ID NO: 274 - DNA, 831 bp, artificial
  Centroid sequence
atgaaaaacgcaatatttccgcttttagcggtactgatctggtccattaatgccgtcgtaaataaagcagctgcgtctgttatcgatcctgcggctatctctttttatcgttggtttctcgcctttttaattatgacaccttttttgattatgccagtttggcatcatcgtaaaaccgtcaaacaatattggtggaaattatttattcttggtgcattaggaatggtgatgtaccagagtttggcttattatgctgcacattatgttagcgcaacatttatggggatactaaattctcttatcccattattaaccgtcattattagtatttttgttttacgtgttgtacctacggtaggtattgttttaggcactgtgctttcaattagtggcttagtttggctaattagccgtggcgaaccctctcagttactttcccaaggcttgggttatggtgaattgatgatgtttatagcttcggcgtcatacgctctttatggtgtattaacaaaacgatggtcaatcacactacctaactggcaatcactttatgtgcaaattggatttggtgttctgttattattgccaaacttctttcttgccgaaagtgttgcattaacaaaagataatattggattggttatctttgcaggtatcggagcttctattcttgcaccttatctgtggattttaggtgtgatgaaattaggtgcaaacacaacctctatttttatgaacctaatgccattatttactgcaatgattgctatcgcacttcttggtgaagaaatgcatagttatcacttagtgggtgggggattgtgttactag

SEQ ID NO: 275 - DNA, 630 bp, artificial
  Centroid sequence
atgatgatcgaaatcttaaaacgccatggactcacattagctatctttgcagcttgtactacgggtttaaccgctgtggtataccacttaaccgcaaacaccattgcagaacaagtggctatagaaaaacagaaattattggatcaggtgatccctcaagcaatgtatgacaatgagctttctaaagattgttatctacttacggcccctgaattgggaaattcaaaacctcataaactttatgttgcgcgtttagaaggtaaacctgttgcagcagccttagaatctaccgccccagatggttattcaggtgcaattgagcttcttgttggcgctgactttaaaggcaacgtgctaggggttcgtgtaaccacacataacgaaacgcctggtctgggtgataaaattgagacacgcatttccgattggatcacaacgctaagtaataaattcatttccagtgaaaacgatccacactgggcagtaaaaaaagatggcggagattttgatcaatttacaggtgcgacaatcaccccccgcgctgtcgttaactcatcaaaacgcacagcatggctaatacaatcattaccagagaaactcgatacactctctgtctgtgaggcgaattaa

SEQ ID NO: 276 - DNA, 534 bp, artificial
  Centroid sequence
atgattaatacccaacaattacgtcaggagcagacagaaaaagctcaacaaattattttgacagaccaatttacaatgcctacttatattgctggcgctgacgttggttttgaagatggtggcgcagtcactcgcgctgccatcgtgataatgcattatccttcttttaaaattcttgaataccaaatcgcgcgaatacctacaactcttccttacatcccaggtttgctttcatttagagagtgtccagcgttattgactgcttggcaattaatcaaacaaaagccttctcttatttttgtcgatgggcaaggtattgctcatcctagaaggctgggggttgccagccattttggtttattagtggatacaccgactattggtgtagcaaaaagtcgtttatgtggtattgataaagcagtcaatgaagaaatgggaagctatgagccattaatggataagaatgagcaaatagggtggatttatcgcagtaagaaaaaaatgcaaacccctgtatatatctccgggtcataa

SEQ ID NO: 277 - DNA, 1251 bp, artificial
  Centroid sequence
atgctaacaacacaaccttatcaacctttagataaagatgccggtattgcactaactagccctcgtttacaaacactcgctaaacaacttgatcaaaaaaatattcaggcgttttggcaacaaatacgtcaggaagggactcctctgattgagccttatgataatggtaaaaagcgagtcacttttctatggcaaggcgccaaaaagaatgtttatttattgggatcacccgatggtaatcatgatccgttaacacgtttagccaatagtgatatttggtatcgtagttatatcgtgcctaacgacacattaatgcaatataaattagcgcctgatgtacctgttattgaaaattcagcgccttttgagcaacgtcgcgcgattttaaccacggcacaagctgatccatttaattcccaaaattcaccaagtcaatctgaggatatctataatcacttttctttattgtcgctaggcagtaagcgtgaatgccagttgcctgatattcttgatagaaccatgaagggtaagacagagattgttcgctttcacagtgagatcttaaataatgatcgtgaaatagcactttaccggccagcccaaaaaatggaaacaccacggatcctcgtattatttgatggtcaaatttatcgtcgccaatatggtattgataagttttttgataaacagatagaggaagggaaattggcaccgatgatgatcctatttgttgatagtattgatagcgatcgccgtagtgttgaattaccaccaaatcctgatttttaccgtttcttggcagatgaattatttgtttggctagaaaaagagaaaggtattcacatatcagcagaagaaacgattgtatcaggctcaagttatggtggattagcgtcttcatgggttgcatttaatcgcccagatcgctttggtaaagtactgagtatgtccggatcttattggtgggcacctgaaaatgaagagcctgaatggcttattcgacaatttgagcaagcagataaaaagccattacagtttttcttagaagcagggctatttgaaagtcgtggtgataaaggcgggattttaaataataatcgccacttgaaacaggttttagagcaaaaaggctatcctgttcaatcactcgaaatggccagtgggcatgattatatttcttggtgtgaaaccctgtatttaggggcaaaagcattaactcaagagaatgacgagtttaagatcacgccttaa

SEQ ID NO: 278 - DNA, 1083 bp, artificial
  Centroid sequence
atgagcgaaaatagagcgtctaaacaacactcaagtaaaacaacaaaagcaagggtagtgaaggaatatcagcgacagatacttcgtcgtttcttttacttaatgatattagggggcgtgttatgtagcgttttgatccttgattttactttagggccttcaggattatcgctgactgaactgtggaatacactaatatcgccagaaactgccgatgctggcactcgggttattgtgtgggatatcaggctaccttactcccttatggcggttgtcgttggaatgtcactcgggttagcgggtgctgaaatgcaaactatactcaataacccgctggcaagtccctttacgcttggcgtctcttctgctgctgcttttggtgctgctttagcgattgttttaggaattggtattccgggggttcctgctcagtggtttatttcagttaatgcgtttattttcgcattactggcaacgttgttactggactttatctcacgttggatgcgagtttctacctctggaattattctctttggcatagcgttagtgtttacttttaatgctgccgtttccattatgcaatttatcgctaacgaagatacgcttcagggattagtgttctggacaatgggtagccttaatcgggcatcgtgggataagttatacattttattggttgtattagtgattatcttccccttgtcattgatgaatgcttggaaactgacggcacttcgtctaggggaagatcgtgcgatgagctttgggatcaacgtcagacgcttacgcctaacaacattacttcgtattagcatcatttctgccttggcggtggcatttgttggcccaataggttttattggattagtcgctcctcatattgctcggatgacttttggcgaagatcatcgtttttatttgcccgcaagtgctcttattggcgcattggtattatcgatagcttctttagtctccaaaaaccttttgtctggtgtgattattccggtgggaattgtgacttctcttgtgggtatccctttctttgttagtatcattttgcgtcatcgcgggagaatataa

SEQ ID NO: 279 - DNA, 600 bp, artificial
  Centroid sequence
atgtatcaaataaattttcttccttggcgtcaagccttatatcgacatcaagcacaacggtggctttattggagcatgatactcgttgttattacattcagtgcttgcggttactacgcttattatttagtacaacaagtaaaaacactctcacttttacaatcacaatatcaaaaacgtgagtactcactacaaaagcaatatcacaatgaccaacatgaacagaaagtcacccgcttatatcaacagcgttattggcattattatcaacattggcttcactatttaagttacctcgctttctttcaagcactagaaacactgctccctacggaaggttatatcgcgcagttttctgaaaatgatgcaacattttcgcttcaggtgcggcttccttgtgagcaggcacttacttttatatctaaagttaaccaacaccccaacctaacatcattaacactctcctcttttcaacagagcaaacaagatccccgttacagcgaaataaggttttctggtaagtggcagagttggcaatatcaagtatctcaacataggcatagcgaacaagatgtcgataacaatgaaaataaagactaa

SEQ ID NO: 280 - DNA, 657 bp, artificial
  Centroid sequence
atgttagttaaaactcttatcggtctgttttcttttttctttatggtgaatgtgagtattgcgaaatcacttcctgaagaactacaagatttctttgtcgcgcttcatcaacaaggcgataaagtgacagtcacagttttaacaccggaagagaaatggccagtgtgtcaaacacaagcgatccaacgccatgcaggctctcgtaattgggggcggctttcgattcccattcaatgtgataaacaacgtcgttttattcaagttgatgtgagtgtaacgggtaaatatttagtcgccaaaaaagacatcaatcgtgatgatgcgattgaaacggcatcagtcagcatgataacaggtgaattagaaaagcaaccttatgacgtattacgtgatcctacgttaattaaaaatgccattgctatgcgccaaatttctgccggaaaacctatcacatcgaccatgatccgtcgcccttgggctattttggcaggtcaaaccgttactgtttttgcacaaggcgatcattttcaaattcgctatgaaggcaaggcaatcaacaatgctgttgccaatgaaacgattagagttagagtgaaatcaggccaaatcgtcattggagaagctcttgaaaatggctctgttcgcatccctctttaa

SEQ ID NO: 281 - DNA, 606 bp, artificial
  Centroid sequence
atgaaactttattacgcgccagatacctgttcattatcaccgcacatcgtgctgcgcgagctgaaccttgaatttgaactggtgagagtcaacaacagaagcaagatcaccgctgatggtcgcgacttcctcaccattaacccgaaagggtatgttgctgcgcttgagctggatgatgggcagatcctcaccgaagggccggcgatggtgcagtacctcgccgatcgtaaacccgaatacggcctggcgccacgcgcgggcagttgggaaagggtgcgcctgcaggaatggcttaactttatcaccagtgaaatacacgcgggttcggcgccgctgtttaactccgcgctggcggaagatgtcaaaacgatttttcgagacaagctattccgacgcttcgattttctgcagacgacgctcagcgaaaaaacctatctgactggcccgtcctttagcgtggcggatgcctacctcttcacggtgctgggatggtgcaaattcttcgcgatcccactggatcgctggccagcgctatcgtcgtatatggaaataataaatgcccgtcctgctgtacaggcggcattacgggctgaagcgtctcaatag

SEQ ID NO: 282 - DNA, 873 bp, artificial
  Centroid sequence
atgaatcttttacactggcgcctgctggtagccgtggcggatgccggcaatatctcacgtgctgccgaggagataggcatgacccagtccggcgccagccaggccattgcccagctggaggcttctctgggctttccggtatttacccgtgagcgacgatacatcgggattaccgccctgggtgagcaggtggtggaacatgccagaaacatgctttcgcagctgaacgccatccgtgaactggctgatcggggccggaacgtcacccgcgggcgcattcggctggccagttttccctccgtgacgtctaccttgttgcccggcctgctgcgcgacgttaagcgcctgcatccgggtattgacgttgttgtgctggaaggctctgacgaagaagtcgaagcgtggcttgccgcagacaccgttgaacttggggtggtcatgaatcccgttcccggacgtgcagaggtggtactaggacaggatgcatgggtcgcggtcctgcccgccagccatcggttggcacagcatgcgaaagctgatggcataacgctaaaggcgctggcggaccagccctttgttctggcgacgggcggctgtgtcgtgaatggcaaaagcctgatggaaaaggccgggttgcaactctctgatatccgcgtgacggttcgcgactggataagcgcctgtaaactggtcggcgaagagatgggcgtcgcgctggtaccggaatccgccctgccggagaccttacgcaacctgtgcgtggtgccagtgacgccggctattcatcgtgaatttgggctggtttgttcgccatccggaacgtcttctgatgccacacaggcgctgcttaatgcgctacgtaaacgaagatga

SEQ ID NO: 283 - DNA, 543 bp, artificial
  Centroid sequence
atggaaatgtatatcggactggctattgtcgccgtgatccttatctgggcgatcttcacttataaccgttttatctctctacgccgtttcaaagatgaagcctggagtggcattgccgtccagctcaagcgccgtcacgatctggcgcccaatctgttcagtctggtcaaacgctatgcgcagcacgaaaaagagctgctggaagagattggccgccagcgcagcgtcctgatcggcaatccccaacaggtggccgacagcgagcagcaatatgccggaacgttaagccgtatattcgccctggcggaagcctatccggaacttaaagccagcgaaaacttcctctcgctgcagcaatcccttagcgaaatagaagaacagctgcagatggcccgccgttacttcaacgccacggtccgcgagtttaatattctggtggagtcttttcccagcctgctgctggcccgcctgtttagcttcagggcggaacttttctttgaactggagtcccctgaagaagctaaattgccacggatggagtga

SEQ ID NO: 284 - DNA, 1215 bp, artificial
  Centroid sequence
atgaaaattctcttcgttaacaaattcttctttatcaaaggcggcgcggaaaccgtttattttcaggaacgcgacgcgatgctgcaagccggctaccaggtggtcgacttcagcatgctgcacgcggaaaataaaccgtcgccgtgggaggaatttttcgtccataacgtcgattaccacgacagccacggcctgatgagcaaaatcaaagctggggtggactttatttataatgccgaggcctgcgcgaagctcaacacgcttttgttgcgcgagcggccggatattgttcattttcataatatctatcatcagcttacgcctgccgttatcggcgtggcgaaacgctttggctgcaaaacggtactcaccgcccacgattacaaaatcgtctgtccttcgtacaccatgctgcgcgatggtcatgtctgcgaagagtgtctgaccgggtcagtgatcaacgcttttcgtcaccgctgccagcagggcgatactttcaaaagtctgctgctatcgttggaggcctactggcagaagttcgccaaaaattacgccatgctcgactgtatcatcgccccaagcgagtttatgcgccagaccctgctgcgtaagctgcccgacgcccgcattgaagtgatcgtcaacggtattgatgccaatagcaccgtccccggcgaaactgcgggcgactattttctctatattggccgtctgagccgggaaaaaggcgtaccgactctggcgcaggcgcagcaaaaaatgcaggaggcgatgccgcttaagattgtcggcgatggcccattgggcgcagacctacgcgcgcgcttcaacggcccgcagttcctcggctatatgaaacacggcgaggagctgaataaccttattcgcggggcccgagcggtagtcgtcccctctgaatattatgaaaactgctccatgtcggtgctcgaagccatggcttttggccgcccggtgatcggcggcaatattggcggtatcccggaacagatccgtgacggcgtcgacggctatctggttgaacccggcaatagcgacgcgctggcgcaactgatggacaaactggctgcagaccctgagctggcccgcaatatgggaattaacgcccgccagcggctggaagaaaaatacgatctcgcccgccacatgcaggtgctgcaggcgctttatgaacaacttgtcggggagaaaaaatga

SEQ ID NO: 285 - DNA, 903 bp, artificial
  Centroid sequence
atgaatatcgagttgcgtcatctgcgctattttgtcgccgtcgccgaggaattacattttggccgggccgcagcgcgactgaatatttctcaaccgccgttaagccagcaaattcagatcctcgagcagcagaccggcgcccgcctgttcgcgcgcaccaatcgcagcgtcagtctgacggcggccggaaagcagtttctcgccgatagccgacaaattcttgcccaggtggatgacgcggccgcccgcgctgcgcgtctgcatcacggtgaaaccggcgaactgcgtatcggctttacctcctcggccccctttatcaaggcggtatccgatacgttgtcgatgtttcgtcagcgctacccggatgtgcatattttgacccgcgagaccaacacccgcgaacagattgtgccactgagcgagggggctctcgatctggggctcctgcgcaatacccaactgccggacactctggcgtgggagcgggtgctgcgcgagccgttgctggcgatggtcccggccgaccatccgctggcccgccagccctcggtcagcctggcggcgctggcgcgcgaacccttcgtctttttcgacccgcacgtgggtaccggcctgtatgacgatatcctcggcttgctgcgtcgttacggtcatacgccggtgattgcccaggaggtgggggaggcgatgaccattattggtctggtggccgccggactgggggtgtctatcctgccggcctcctttcagcgcgtacagctcagtgaaatgcgctggctgccgatcgacgaacaggatgcggtgtcggagatgtggctggtgtggtcgaaacatcatgaacagggagcgctggcaaaacgctttcgcgagtcgctgctggcctggaaaaccgagcacaattga

SEQ ID NO: 286 - DNA, 687 bp, artificial
  Centroid sequence
atgacccaccggctgccggtcgacggcgtggtagaggcggtaattgccggggttcaagagggatgccgcgatttccaggtcgacgcccggctgatcggtattctgagccgcaccttcggcgaagccgcctgtcaggaagagctggcggcgctgctcgcccaccgcgagggcatcactgccctcgacctcgccggcgatgagctcggcttcccgggtacgctgttccgcaaccattttaaccaggcccgcgacgccgggtggcatatcaccgtccacgcgggcgaagcggccggcccggaaagtatctggcaggccattcgtgagctgggcgcggagcgcatcggccatggggttaaagcggtagaggatccagccctgatggactacctggccgagcaccgcatcgggattgaatcctgcctgacctcgaacgtgcaaaccagcaccgtggcctccctggcccagcatccgctgaagcagttccttgagcacggcgtgctggcgagcctcaacaccgacgatccggcggtccagggtgtggacatcattcacgagtataccgtggcggcgccggcggcagggctgagccgggagcagatccgtcaggcgcagatcaacggcctgaccctggcgttcctcggcgaacaggaaaaagccgctctcattcagcgggttgctaaaggctga

SEQ ID NO: 287 - DNA, 1428 bp, artificial
  Centroid sequence
atgcaacacaaccttttgataaacggtaagttagtggcaggtgaaggcgaaaaggtgccggtatacaaccctgcgaccggcgatgtgatcctggagattgccgaagcgacagcggcccaggtcgatgccgccgttgaggcggcggatcgggcgttcgatgcctggagccagacaacgccgaaaacgcgctcggaatgcttgctgaagctggcggacgctatcgcggcgcaggcggagaccctggcgcagctggagtcgctgaactgtggcaagccgttgcactgcgtgattaacgatgagatgccggccattgcggacgtcttccgcttcttcgccggcgccgcccgctgcctgccgggaattgccgccggagagtatctcgaagggcatacctcaatgatccgccgcgacccggtgggcgtggtggcctctatcgccccctggaattatcccctgatgatggcggcctggaagctggccccggcgctggcggcaggcaattgcgtggtgataaaaccctcggagatcacccccctgacggcgctgaagctggcggagctggcaaaagatatcttccccgaaggggtgatcaacgtgctgtttggccgcggcaaaacggtaggcgacccgctgacctcgcatgccaaagtgcgaatggtgtcgctgaccgggtcgattgccaccggcgcccatatcatcagccataccgcctcgtcgatcaaacgcacccacatggagctgggcggcaaggcgccggtcattgtttttgacgacgcggatatcgatgcggtagtcgacggggtacgaaccttcggcttttataacgccggccaggactgcacggctgcctgccggatctacgctcagcagggtatttacgaccaactggtggagaaacttggggcggcggtggccagcctgaaaatgggtgcgccagaggatgcctctaccgagctgggaccgctgagctcgctggcgcatcttgaaagggttagtgccgcagtggaagccgcaaaggtactaccgcatattaaggtggtcaccggcggtcgccgggctgacggcgcgggctattacttccagccgacgctgcttgccggcgcccggcaggaagacgccattgtgcagcgcgaagtgtttggcccggtggtcagtgtgacgcctttcagcgatgaagcgcaggccctgagctgggcgaatgattcccagtatggtctggcgtcctcagtatggacgaaagatgtaggccgtgcccaccggcttagtgccaggctgcagtatggctgcacctgggtcaacacccactttatgctggtgagcgaaatgccgcacggcggccagaaactgtcgggctacggaaaggacatgtcgatgtatggccttgaggattacacggtggtccgccatgtcatggttaagcatggctaa

SEQ ID NO: 288 - DNA, 912 bp, artificial
  Centroid sequence
atgaaagtaaccgtactgggatgcggtgcgctgggacaactatggctgaccgcgttgtacaaacagggacatgaagtccagggctggctgcgcgtaccgcagccattctgtagcgtcaacgtcattgaaaccgatggctcagtgttcaacgaatcgctgacggccaacgaccccgattttctcgccagcagcgagctgctgatcgtcaccttaaaggcctggcaggtgtcgaatgcggtaaagcacctggccgggatcctgccggacaccacgccaattgtgctggtacataacggcatgggcaccgtcgaggagctgcgcggcgtgaaacagccgttgctgctggcctccacgacccaggcggcgcggcgcgatgggaatgtcatcatccacgttgcccagggcaccacgcatatcggaccggcaaaaagctacgagggggactacagctatctcgcagaagttctgcagagcgtgctgccggatgtcgcctggcataacaatatccactcggccatctggcgcaagctggcggttaactgcgtgattaaccctctgaccgcgctcaaagggtgtaaaaacggcgatctgcgcgactatacgcaggaagttgcggccatttgtcgcgaggtggcggcggtgatggagcgcgaaggtattcatacctcggcggaaaacctgctattttatgtcgaacaggtaattgaaagtacggcagaaaatatctcttccatgctgcaggacgttcgcgcccagcggcatacagagatcgactacatcaccggttttctgctcaaccgcgcccgcgcccacggcgtcgccgtaccggaaaacgcccgcttatttgaattgatcaagcgtaaggagaatgaatatgagcgcgtcggcactgatttgcctcgcccctggtag

SEQ ID NO: 289 - DNA, 1020 bp, artificial
  Centroid sequence
atgaatattaatatacttgaaaaaatgaataaggtgcccggtgggttaattattattccactgctggtggctatattaattaatactttcgcgccccaggtgctcagcattggcggcccgaccaccgccttatttaaagtcggttccagcgccatgatgggcatatttttgctcatttgcggaacctcgatcaatatccgtcaggccgggttgccgctctataaaggcgccgtgctgctgtttctcaaatgtctggccggggcactggcggtgtgggttgcgggaacgttgtttggcccgagcggttttctcggaatatcgaccctggcgctgattgcctgcctgaccagctcgaacagctccctctatatcgcattgtgcagcaactatggcgatgccagtgatgccggggcgatctccgtattctgcatcaaggatggtccgtttgttaccatgatggtgctgggcgtcagcggcctggccaatattcccttcgccgcgctgctgtcgatgctgatcccactgctgattggcatgctgtggggcaatctggacgaacgctttaaacagttatgcgctgcggcgcagccgctggtgatcattattatgtcgttcgccatcggcgccaactccagtatcaatacggtgttcaccgccgggctgtccgggatcctgttggggattatctccgcgctaaccgggattgtgttctactttatctacaacctgtttttgaagaagaaaagcgcgctgggcgccgcgctgggaaccaccgccgccagctcggcgctgacgccggcgatggttgcccaggcggatccttcgctggcgatgtacgtggatgccgccaccgcgcagctggcgacggcgagcattatcaccatgatcaccgcgccgatactggtcgcctggtttgataaacggctgaaaaagcgtgcgccagccgctgaaccgctgaaagaggtgaaaagtgaagagagcgtgacattatcttcccctgccgccaaaggacacaaatag

SEQ ID NO: 290 - DNA, 264 bp, artificial
  Centroid sequence
atgaaagcccatatccatcccccctatcgcacggtggtgtttcacgacaccagcgttaatgagtattttaaagtcggttccaccatccgcaccgatcgcgtgattgaactcgacggcgaaacttttccgtatgtgacgatcgacgtctcctcgaaatcgcatccgtactacaccggcaaacaaaaaaccttcgccagcgagggcagcgcggcccggttccgtcagcgcttcggcggctttattgatgcgaaaaggaaggcatga

SEQ ID NO: 291 - DNA, 1059 bp, artificial
  Centroid sequence
atgaaaacatcgccgctcctccgctcacttgtcctgtcgctgacgctgctgaccagcgtcccgtcgtttgccgccgtcaaaaaagagttcaacgtctgctggaccatctacgccggctggatgccctggggaaccatcagtaacgaaaagatcattgataaatgggccagcaaatacggcatcaagatcaatatcgtccagctcaacgattacatcgaatccatcaaccagtacaccgccgggcagtttgacggctgcacgatgaccaacatggacgcgttgacgatcccggcggcgggcggtgtcgacagcacagcgctgatcaccggcagctactccgacggtaacgacggggtggtcctgaaaggggcggataaaaagctcagcgacctgaaagggatgtcggtgtatctcccggagctgtcggtatcccactatctgctggtgcgcggcctggaaaaagccgggctgcaggaaaaagacgtcaaggtggtgaatacctccgatgccgatatcgtctcggccttcggcaccagcggcgtgcgggcggcggtggcctggaatccacagctgtcggttatcaaaaagaccccacaaaccagcgaagtgtttagctcctcgcaggtgccgggcgagcttatcgacatgatggtggtgaatacccagaccctgaaagataaccccgcgctgggcaaagccctgaccggcgcctggtttgaaatgatggccaaaatgaaggccggggatagccaggcgttgagcgccatggccgccgactccggcaccgatcttgccggctaccaggcacagctgaaaacaacccatctgttctggacgcctgccgacaccctggcgtttatctcctcgccggatctggcgaaaacgatgcagcgagtggcgcagttctcgttcgataaaggcctgctgggtgaaggggcgcagagcgcggactttatcggtatgaccttcccgggaaatgtcaccctcggcgatgccgccaaccgcaaactgcgctttgacgacagctacctgaagctggccgccgcgggccagctgtaa

SEQ ID NO: 292 - DNA, 816 bp, artificial
  Centroid sequence
atgcgccacattaaccgttatccccaaaaggggatgcgcctgacgctgatgctgctgccttttgtcgtgctgatcgccgcctggtttattggatcggcggtgcggctggaagccaatccgcaggacaagttgctgccaggcctgtcgcagatggtggcagccattgaccggatggcgttcaccccggacaaacgcagcggtgagtatctgctgtgggccgatacgctgatcagcctgagccgtctgttgacgggcctggccgtctcgtcgctgatcggcctcggtatcggcatcgccgccggcgtcttcccgatgtaccgcgcggcgctgtcgccgctgttgacggtggtgtcaatgatcccgccgctggcgatcctgccggtgctgtttatcgtcttcggcctcgatgagctgtcgaaagtgatgctgatcgtcatcggcattacgccaatgctggcgcgcgacctggagcagcggacgagggagatcccggcggagctgtttattaaggcgcagaccctcggcgccaatagctggaccctggtgctgcgggtagtgcttccccagctgctgtcgcggctgatcacctctctgcgcctgctgctgggctcagcatggctgttcttgatctccgccgaggccatctccgctaccgccggactggggtaccgcattttcctggtgcggcgctatatggcgatggacgtgattattccctatgtcatctggatcaccttgctggcatggctgatggatctggcgctgcgccagctgcacaaagcctgtttcccatgggcggaaggaggccggggatga

SEQ ID NO: 293 - DNA, 777 bp, artificial
  Centroid sequence
atgagttttatcgacatcaaaaacatctggcaggagtacggcgatcacgtggtgctggagcgcatcaatctgcaggtgaaagagggcgagttttgctcgatggtcggcgcgtccggttgtggtaaatcgacctttttacgcctgctgctcggtcaggaaaaaccgacccgtggcgacatcctgctagatggccagccgctggcggcggagccggatcgcagccgcggcgtggtcttccagcgctattcggtgtttccgcatctcaacgtgctggataacgtcgccatcggcctggagctgccggcgtccccgttgctggggcgcctgtttggcggcagaaaacgcgaggcccggcaacaggcccagcacatgctggagaaagtggggctggggcacgctctggataaatatccggcgcagttgtccggggggatgcaacagcggctggccatcgcccaggcgttcgtgatgcagccgcgggtgctgctgctcgatgagcccttcggcgcgctggatcccggcattcgcaaagatatgcatgcgctgctgctccagctgtggagcgaaacgcgcatgacggtgtttatggtcacccacgatctggccgaaggcttcaacctgggcacccggctgctggtgttcgacaaagtgcgcatcgatccgcaggcgcctaacgcctggggagcgcgcattacctacgatatcccgctcaatgaggcgcggatggcgcagctggccaccggtagtgacaccaacgtttacgcattaaggagataa

SEQ ID NO: 294 - DNA, 714 bp, artificial
  Centroid sequence
atgaaaaccattggcctgttaggcggcatgagctgggagtccacgatcccctattatcggttgatcaatgagggcgttaaggcgcgactgggcggcctgcactctgccagcctggtgctgcacagcgtcgattttcacgacatcgaagcctgccagtccgccggcgactgggatcgcgccggggagatccttgctgaagccgcggttgggctgcagcaggcgggggccgaaggcattgtcctgtgcaccaacactatgcataaagtcgcggatgccatcgccgcccgctgccaggttcccttcctgcatattgccgatgccaccgggcgggcgattgccgccaaaggccagcgccgggtcgcgctgctgggcacccgctataccatggagcagaccttttaccgcggtcgtctgctggagcagtttgccatcgagacgttgatccccgaggctgacgatcgggcgcggatcaatcagatcatcttcgacgaactctgtctcggcactttcagcgaggcgtcgcgggattattatctgcaggtgatcgccgccctggcggagcagggggcggaaggggttattttcggctgtacggaaattggcctgctggtgcctgccgagctcagcccgctgccggtctttgacactgcggcgatccacgcagaagacgcggtaaactttatgctctctgcaggaccgacgccagcggcgtga

SEQ ID NO: 295 - DNA, 2010 bp, artificial
  Centroid sequence
atgtctcatttattttatggcgtggcgtattacgatgaatatatgccggaagatcggctggcgaaggatatcgccttaatgcgcgaaaccggcattaacgtggtgcgtattgccgagtccacctggagtacgctggagcctgaagagggccagtacaatttctaccatatcgaccgggtgctggaggcgatgcatgaggccggcattgcggtcatcgtcgggacgccgacctatgcggtaccggcctggctggcggcgaaacatcccgatattctggtcaccaccgtcgcggggcagcaaaaatatggcccgcggcagatcatggatatcgtcaatccgacctttcgccgctatgccgaaaaaattatccgcacgctgatggcccatgtgcagcaccatccggcgattatcggctggcaactggataacgaaaccaagcattacgacaatattggccgctatatgcaggagggcttcgtgcgcagcctgcaggagaaatatcctgacctccggcagctgaatcgcgatttcggcctggattactggagcaaccgcattgaccgctggcaggattttccgccggtggaaaacaccatcaacgccagcctcgcctgcgccttctctcgctatcagcgtcagcaggtcaccgagtatctggcctggcaggcggccatcgttcgggaatacgcccagccgcaccagttcgtcacccacaacttcgatttcgaatggcgcggttactcttacggcgtgcagccgcgggtcgaccattttgcggcggcgcaggcgctggatatcgccggcgtcgatatctatcacccgagccaggcgcacctgaccgggcgggaaatcgcctttggcggcgccatcacccgctcgcttaagccgggtcagaactacttcgtactggaaacccaggctcagggcttcgcccagtggacccccttcccgggccagctacgcctgcaggcattcagccatatcgcctccggcgccgccatggtctcctactggcactggcattcgattcataacgccttcgaaacctactggaaggggctgctcagccacgacttctcgcgcaacccaacctggcaggaagccaccaccatcggcgccgatttcgcccgcctgtcgccgctgctggcggagctgaaggccgaaaatgacgtcgcgttgctaataagcaatgaggcgatggacgccctcaatcacttccgtcccggcgatgccgagggcaacatttataacgatatcttccgccgcttccacgatgcgctgtatgaccacaatatcagcctcgacatcatccacgatgtgaacgaggaaacctcgcgctaccgggtactgatcgttcctggtctgtacgccgccgatgatggcctgctaacacggattaacgactatatcgcccggggcggcagagcgctgatcggctttaaatcaggctttagcgatgaaaatgtcaaggtgcgcaacagcgcgcagccggggattttgcgccagagctgcggcgtcagctacagccagttcaccctgccggaagggacgacggtaagctcatgctgcgcagagattgattgccgcaatgataatcaggctgagctgtggatggaattgctgacgcccgatggcggaacccgcacactgctgcgctatcagcatccggcatggggcgaatacgccgccgcaacggcggcggattacggtcagggacgcgccctgtacgttggcttcctgccgcacaagcgcctgattagccagctgtttgatgtcctgacggcggatctctcgctgaactcgcgaacttccgcctatcgctatccgttagtggttaaaaagatgcgtaaccgagccggaaatactatccacttcctgttcaattactccggcgaggcgctggatgttgtcagcgagaccgcgggtaccgcgctgctgagcggggaggctgtagacgtcggccagccgttgcgcctcagggcctgggaatttactatcatcgaaagctaa

SEQ ID NO: 296 - DNA, 1521 bp, artificial
  Centroid sequence
atgcaggcgacagcaaaagagttcatcattgccctggatgaaggcaccaccaacgccaaagcggtggtgctggatagccggggcaaagttatcgtcaaattctcgcagccgctggcgatccaaacgccgcgcgacggctgggtggagcaatcgggcgaagcgctggtgaccgcctcactgacggtgatcgccagcgcggtggcccacgttggcgcggaaaacgtcgccgcgctggccatcagcaaccagcgggaaaccgccatcggctggtatcgcgacagcggtgaaccgattaacgcggcgatcacctggcaatgcacccgcagcgccgcgttctgcgataagctgcgtcacgatcgtcaggaacagcacattaagcgtgccaccggcctgccaatcgccccgctgttctcggcctccaaaatgcgctggctactggatgcgactgtcgatggccacctgcgcgccgaacgcggtgagatttgcctcggcaccatcgacagctggctgctgtggaatctgaccgctggagaagccttctgctgcgactactccaatgccgcccgcacccagttgctgaacctgcaccgcggcgagtgggacgacgagatgctggcgttgttcggcattccgcgcgcggcgttgccggacattaaaccgtcgagcggcctcttcggccataccaaaggactggccgccattccggacggtattccgatcatggcgatgatcggcgactcccacgcggcgcttttcggccacgcgctcggcgaggcaggctgcgtcaaagccacctacggcaccggctcttcggtcatggccccggtcaaatcggcccagtgcgatatcgacgcgctggcgaccactgtcgcctggcacgatggcgaccagctggtgtggggcctggaagggaatattcctcacaccggcgatgccgtcgcctggatggcggacagcaccggcctgagcgaactctctgccgccgagctggcccatgagctgaataccctccccgcctccgtcgactcaaccctcggggtctacttcgtgccggcgctgaccggtcttggcgcgccctggtgggacgacagcgcccgcggcgtgatttgcggcctgagtcgcggagtgaaacgcgcgcatctgatccgtgcggcgctggagtccatcacctatcagatagccgacgtggtggtagcgatgcgtcagcatgaggagttcaccctgacggcgttgatggtggacggcgggccgaccaacaatgactggctgatgcaataccaggccgatctgctcggctgcccggtgatgcgcagcgacgtgccggagctgtccgccatcggcgcggcgttgctggcgcgcaaagcgctccatcctgggtcgaccgccgatctgcaggccttcttaaccgaacacagcacctttcagcccgacatggcccgccaccagcgtttacaaacgcgctggcaggagtggcgccatgcggtcgaccgaacattatggaaaccggactcgccagcctga

SEQ ID NO: 297 - DNA, 471 bp, artificial
  Centroid sequence
atgccgcccattaaccgtcagtttgatatggtccacgccgacgagtggtcgatgaaagtcgccttcgccagctccgattaccgccacgtcgatcagcatttcggcgccacgccgcggctggtggtctacggcgtcaaagccgaccgggtcaccctgctgcgggtggtggagttcccggtcgccagcggtcaccagaccgagaagatagccgagcgcatccatgcccttgaggattgcgtcaccctgttctgcgtggcgattggcgaggcggtttttcgccagctgctgcaggtgggcgtccgcgccgaacgcgtcccagaccagaccaccatcctcggcttgctgcaggagatccaactctcctggtatgaaaaagcgcagcgccgcagcgcgcggcaacgcgatccgcagcgctttaaccgcctgctggaggagccggcgtggcgggaggagcccgacccgctcccctga

SEQ ID NO: 298 - DNA, 885 bp, artificial
  Centroid sequence
gtgggagagagaatggaactggatatcaatgagctactcaatttctcgccattgatgaaaacctttaccttcaatgcctgggtcgtcgcaggcttcacgccgattacccgcggctccacgctggactactacattaatcgcccgcaggggatgaaaggttacatcattaatctgaccctgcgcggccaggcgcgggcgaaagcgggcgatggcttcctgctgtgccgggaaaacgatctgttgctgtttcctcccggcgtgccccatcattacggcagggacgaacacagcgagtactgggaccatctgtggatctactttatcccccgcccctactggatagactggctaaagtgggaccaaaccacccacggtatcggcaaaacaaccattaacgatcctgaccagctccagcagctgcgcgatcttttctacgaagtaatacgccaccactctgcgtccgtaccgctgtcagaagcgctggcaatgaacgcgctggagagattaattctccgctgttttcagcagcagcccattagcaaccgccatgcccacgacccacggattaacgccatctgcgactatcttaacgcccatattgcgcaggaggtaaaaatcgagaccctggcggcgatggtgtttatctccccttcacgtctggcgcaccttttcaaaaatgaactggggcaaacggtctatgcgtggcgggaaacgcagcgcatcaaccgcgccaggtggcttattcagagcacctcgctcccacttaacaaaattgctttatcggtgggttacagcgatccggtctatttcacccgcctttttcgtaaacataacggcatcccaccgggcgaatatcgcaaacgctatgcggaaatgaagggctaa

SEQ ID NO: 299 - DNA, 987 bp, artificial
  Centroid sequence
atgaaacgcaaaacgatgatcaccttagcccttctcagcgcgcttggcgcctcctcggccgcctgggccgtcgactacccgcttcctcccgccaacagccggctgattggccagaaccagtactggaccgtacaggagggagaccgcaacctgcaggcgatcgcccgccatttcgataccgcggcgatgctgatcctcgaagccaacgataccatcgcgccggtgcagccgaagccaggtactcaggtcctgatcccctcccagatgctgctccccgacgtaccgcgagaggggattgtcgtcaaccttgcggaactgcggctgtattacttcccgccgggagagaatcaggtgcaggtctatccgctgggtatcggccagttagggctggaaacgcctgagatgaccacccgcatcgggcagaagatccccaacccgacctggacgcccaccgcgggcattcgcgcgcgttcgctggagaaaggggtgacgttaccagcggtggtcccggccgggccgtacaatccgctggggcgctacgcgctgcgtctggcctatggcaacggcgaatatctgattcatggcaccaacgcgccggacagcgtcggtttacgcgtcagctcaggctgtatgcgaatgaacgccgatgacatcaaagcgctgttcaaccaggtgaaaaccgggacgccggtacggattatcaatcagccggtgaagtttgccgtcgaaccggatggtaaacgctatgtcgaggtccacaggccgctttcgcagacggaaggggaaaacacccggaccatcgcctacacgctgcctgcggcgtttcacgccttcgcagaggataaagcggtcgatgatgcacagctgaaaaaagcgatgtcgagaagggcgggatatccggtggtggtgtccacggggacggggagtgcgccagctacgctgtcggcgcagaacacgccgtcagacaacagcctgcttacccagtag

SEQ ID NO: 300 - DNA, 1017 bp, artificial
  Centroid sequence
atgaaatttcgcttatcgcccctccgtacggcagcgctggttgccgcttctctgtttctggcgccgcaggggatggcggctgacgctcagaacgggattgtggtctacaacgcccagcacgaaaatctggtgaagtcgtgggtggatggattcaccaaagagaccggtattaaggtcacgctgcgcaatggcgatgacagtgagctgggtaatcagctggttcaggaaggctccgcgtcgccggccgatgtgtttctgaccgagaactcgccgtcgatggtgctggtcgataatgccaaacttttcgccccgctggatgccgccaccctgcagcaggttccggcgcagtaccgtccgcagcatgggcgctggatcggcattgccgcgcgcagcaccgtttttgtctacaacccggcgaaaatcagcgaggcgcagctgccgcattccctgatggatctggcaaaaccggagtggaaagggcgctgggcggcttcgccatcgggggctgatttccaggctatcgtcagcgcgatgctggcgctgaagggtgagcaggcgactctcgactggctgaaggcgatgaaaaccaactttgtcgcctataaaggcaacagcacggtgatgaaagcggtcaacgccggacagatcgacggcggggtgatctaccactactatcgcttcgtcgatcagtccaaaaccggcgagaacagcaaaaacacccaactgtattacttcaaacaccaggatccgggcgccttcgtcagcatttccggaggcggtgtgctggcttccagcaaacataaggcgcaggcgcaggcctttattaaatggatcaccggcaagcaggggcaggatgcactgcgcaccaataacgccttcgaatatgccgtgggggtagatgcggcctctaacccgaaactgaccccgctgaaagatctggatgcaccgaaggtagaaccttcctcgctgaacagtaaaaaggtcattgagctgatgacgcaggctggcctgctctga

SEQ ID NO: 301 - DNA, 840 bp, artificial
  Centroid sequence
atgtggaactactccgagaaagtgaaagaccatttttttcatccccgcaacgcgcgcgtggtcgacaacgccaacgcggtgggcgatgtgggttcattaagctgcggcgatgcgctgcgcctgatgctgcgggttgatccgcagaccgagatcatcgaggaggcgggcttccagaccttcggctgcggcagcgccatcgcctcctcttccgcgctgacggagctgattatcggccacaccctgaccgaagccgggcagatcaccaaccagcagatcgccgactacctcgacggtctgccgccggaaaaaatgcactgctcggtgatgggccaggaagcgctgcgtgcggccatcgcccattttcgcggcgaaagccttgaggaggagcatgaggagggcaagctgatctgtaaatgcttcggcgtcgacgaagggcatattcgccgggccgtggtgaacaacggcctgaccaccctcgaagaagtgatcaactacaccaaagccggcggcggctgcaccgcctgccatgaaaaaattgagctggcgctggcggcgatcctcgcccaacagccgccagcgcccctgccagcggagacggcccacgatgcgcactggcaaagcgtggtcgataccatcaacgaactgcgcccgcacattcaagccgacggcggcgacatgacgttgctcaacgtcaccccgcgtcaggtgaccgtcagcctctccggcagctgcagcggctgcatgatgaccgacatgaccctcgcctggctgcagcaaaagctgatggagcgtaccggaacttacatggacgtggtggcggccccggccgcggttaactaa

SEQ ID NO: 302 - DNA, 519 bp, artificial
  Centroid sequence
atgaaaaaattatcagcagctgcgtttgcatttggtctgttatctgtgtctgtatctcaggcattggcggcggatgccaccgttaacttcagcggaaccattcttcaggaagcctgcagtgtagatacttcagacaatactgttaacgttcagctaggcacctacggtgctgctcaattcccgacggtagggacaacgacccttcctgttcctttcgccatcaacttaacgggttgtccggcttcaggtggcccgacggctgcactggtgaccttttcaggggccgcggatgcggccggtgacctggcgttgaccgcaggcggcgcatcgggcgtttccattaatatcaaaaaagcagatggtaccaacattgatattaactctaccgattccggtattgcactgactagcgctacgacccaacagctccgctttaccgctaattacatcagtactgcggcttctgtcaccgcaggcgcggctaacgccgtcgcccaggtaaacatctcttatatgtaa

SEQ ID NO: 303 - DNA, 531 bp, artificial
  Centroid sequence
atggcgaacattggcattttctttggtaccgataccggtaaaacccgcaagatcgcgaaactgatccacaagcagctgggggaggccgccgccgccccggtcaatattaaccgcgccacgctggcggacctgctggcctacccggccctgctgttggggacgccgacgctgggcgacggccagttgccgggcctcgaggccgggggcgagagcgagtcgtgggccgagtttatccgcaacctcggcgacgttagcctgcaggggaaaacggtggcgctgtttggcctcggcgatcagcgtggctatccggataacttcgccagcgggctgcggccgctgtacgacgccctgcgtgcccgcggggcgacgatgatcggcagctggccgaacgaggggtatgagttcagcgcctcatcggcgctggagggggatcgctttgtcggactggtgctggatcaggataaccagttcgacgagaccgacgcgcggctggcgacctggcttgaggagattaaaccgcatctgctgtag

SEQ ID NO: 304 - DNA, 2007 bp, artificial
  Centroid sequence
atgaaacaatttactgggctctggcccaatattgtcgaacgtgccgcagcccatagcgggctgctcgaacggctcgtgaaggatgcgcagccggtactacatgccgcattacgcattccgcagaccgggattgccagctggaatctctactacttttgcccgcaccacggcgtacgattaacgtggcgagcggacatgcccctccagcatgcctgcccggtcgataatgaaatttttcgcggcgaaccgtgggacagcgcgtggtggcgcgaaatgaacgggcgtaatgccagcgcatgccagcagctcggcctgctatggcaactgaccggtgagagagcctggcgcgataaagtacgcgccttactgatgggctacgcggatgtttatccgggctatgaagtccacggtgatattcccaacaacgggccgggtaaaatgaatgcccagaccctgtgcgaagccaactgcattctggacatggcgctgggttacgattttattagcgacagcctgacgcctggcgaacagcagcacatcagggaaaacttgttgcgctgtgcggccacgtttttgcggcagcatcgcacgccgcagatccataaccatgaagtcaaaatcaatgcggcgctggctgtacttggcttcatcctcgaagatgaggatctactggagtttgccgtttttcagccgtacggcttgcgctggcaactggaaaatggcctgctggcagaggggctatggtttgagggttcgattcactaccactactacgcgctgcagggctttttcgcctttgagaagctggcgcgcggcacccgctggagcctgctggatggcccctggtatcagccgatgctgaaattcccgctgtcgctgctgctgccggatggcacattcccgcggctgaatgactgtcttgccgggcaggaaaagctacagcaccgggatctgtacgagttcgcctggtttatctggcgcgatccgctgtatgccgccgtgctgcaattcaccgaaacggagcctgacgaggatgagacgttactgtggcgccatcatccgctgcctgagtcaccgctgacgccgatcccccagcagtctttttttgcaccgggcgcggggttgaccctgtggcgacgtccgaagcaacagctggcggtgctgattaaacacagtccctggggcggggaacacgaccactacgacagacaaagcctgatgctatggcagcgcgacggctggttgttgccggatcctggcaccaccggctacggggcggaaatgcattatgactattataaaaacagcgccacgcataatacgctgtcagttaaccagagcaatcaaccccctgccatcccgacggtgctgggctggcatatggctgacgacgttttctggctggattgtgagaccgactggggtaaaccgccgcctgcgctcgacagtcatagtcgagtcgaatgggaccaggagtcctggcgtgacgtacgctttcgccgccgcctgttgtggcttgaagaggttttgatcgatctctcaacggtggaaaacccgcatcgccagcagctcgactggacgctgcatctggctgccgaggcgctggatcagaacggtacaccgcagcctttttcgctcagcggaccgctgcggcatatgaagaaggcaacgatgacgtcgctgaatggctgtcaaccgcgccactttgtgcgggacggcagcactatcgcgctttggctggcgggcgacggcgagctttggcaagggcaggcccctgataacccggcaataaccgaccttagctatctggttatccgcaatcatcttccacaggcgcgttttgtcggtctgtgggatctggccaacggtaacccgcttaccgaagctcatgtggatcccacgccaaagggaacccgagtgaccttctggcgcagtcatcacatgacgcaggtgatgctatatgacgaacccggacgggcccctgatgtgatcctgcagaggaggtaa

SEQ ID NO: 305 - DNA, 621 bp, artificial
  Centroid sequence
atgaaagagtatctgcctgaaaccgcctcgcagacggcgggaccctatgttcatatcggcctggcgccggacgccgcaggctttcatatttttgagaaaaattttggcccggtcctcactaccgccgataccgtcggggagcgcatcaccattgaaggccgggttatcgacggctccgggacgccggtccgcgatgtgctgctggagatctggcaggccaacgccgcgggtcgctataaccatcctgacgatcgtcaacagcagaaagccgtcgacccggccttccgcggctgggggcgtacctgctctgatttcacctccggcatttggcgctttgaaaccatcaagccgggcccggtggtcggtcgcgatggccgcctgatggcgccgcacgtcaacctgtgggtggtggcgcgtgggatcaatattggcctgaatacgcggatgtactttgccgatgaacacgaggccaacgccagcgacccggtgctgaatctcatcgagtgggaggtgagacgcaaaaccttaatcgccgagcgcgaggttcgcggtacggaagtggtctatcgttttgacattcatctgcagggcgagaacgaaaccgtctttttcgatatttag

SEQ ID NO: 306 - DNA, 1179 bp, artificial
  Centroid sequence
atgacacgctttcttctctgcagtttcgccctggttctgctctatccctccggcatcgatatgtatctggtcggcctgccgcgtattgctcaggacctgggggccagcgaggcgcaattacatatcgccttttcagtctatctggccggtatggcctccgcgatgctgtttgctggtcgcatcgccgaccggtcaggacgtaagcctgtcgccattgtgggcgcggtgatctttgttgtcgcctccctgctctgcgcccaggcgcacgccagcagccacttcctcgccggacgctttatccaggggatcggcgccggcagctgctacgtggtggctttcgctatcctgcgcgatacgctggacgatcgccgccgcgccaaggtgctgtcgttgctcaacggcattacctgcattatccccgtcctggcgccggtgcttggccacctgattatgctgaaatatccgtggcagagcctgttctacaccatgaccggcatgggcgtcatggtcggtttgctgtcggtctttatcctgcgcgagacgcgcccggcggcacatccgcagacggcgacaccgcagcatggcggcagtgagtcgctgctgaaccgcttttttctcagccgcattctcattaccaccctcagcgtgacggcgatcctgacctacgtgaacgtctctccggttctgatgatggaagagatggggttcgatcggggaacttactcaatggcgatggccctgatggcgatgatcagcatggcggtctccttctcgacgccgttcgccctgtcgctgtttaccccccgcaccttaatgctgacttcgcaagtactgttcctggcggcaggcctggcgctgagcctcgccacccgccagaccctcaccctgattgggttgggcatgatttgtgccggcttctccgttggattcggcgtcgcaatgagccaggcgctggggccgttcacgctgcgcgcgggcgtcgccagttcggtcctcggcatcgcgcaggtgtgcggttcatcgctgtggatttggctcgccgccatcatcggactcagcgcaatgaatatgctgatcgggatactcattgcctgtagcatagtgagccttgttttattactggtcgtcaccccgccgcgggttgcgcaatacgatgaagaagccgctgtcgagtcttga

SEQ ID NO: 307 - DNA, 1065 bp, artificial
  Centroid sequence
atgcagatgacaatgcgctggtttgggccagaggaagacaaggtttcattagagcatatacgacaggtgcccggcgtggagggggtcgtcggcgcgctctatgacgtcgcggtgggtgaggtatggccagtcgataaaattgagcgtctggtcagccaggcccatgccgcgggcctgaaaatggaggtgatagagagcgtcaacattcatgatgacattaaaatcggccttccttcccgtgaccgctatattgccaactatcagcagaccattcgccaccttgcccgcttcggcgtcaaagttatctgttataacttcatgccggtttttgactggatgaagacagatatgaactacgtcctgccggatggttcgttgacgatggcttttgagaagaaagatatcgataaacggctggaagacgtagtgaaagaggtactggagaactcaaacggcttcgccttgccgggctgggagccagaaaggctggcggaggtgcagaccctgtttgccaaatatagcgcggtggatgaccacaagctgcgggagaacctggtctattttctgcgggcggtgatcccggtctgtgaagaggtcggggtgaaaatggcgatccatccggacgatccgccgtactccatttttggcctgccgcgggtggtcaaaaaccgcgacgatctggactggatctgccgggccgtcgattcgcccgctaacggcatcacgctctgcaccggctcgattgccgaagatccggataacgatgtgtacgccatcctggcagagtttacccggcgcaaacggatccactttgcccacgtccgcaatattaagctgatacgggataaagatttttacgagtgcgcccatccgtcagagtacggttccctggatatgtacaaggtgatgcaagcgctgtatgacaacgggttcgacggctatattcgcccggatcatggccgttttatctggggagagaccggacggccaggctatggcttgtacgaccgcgctctcggcgtgacctacctgaaggggctctgggaggcgttaagcaagcgctaa

SEQ ID NO: 308 - DNA, 663 bp, artificial
  Centroid sequence
atgtccgacaacgatacccttttctggcgtctgctggcgctgttccagacgctgccggagctgcagccggtgcaagtcgtcgactggctggcgcaggagtgcggcgaaacgttgaccccggcacggttaaccaccctgacgcagcctcagctggccgccagctttccttcggcgacggcggtgatgtccccggcccgctgggcgcgggtcatcgcctgcctgcagggggtgctgcccggccatttgcgcatcgcccgcccccctcagcgaacgccgcagctgcgggtcgctttttgctcgcaagatggcctggccatcaatggtcattttggccagaaccggctgttttttatctatgccttcgatgaccagggcggctggctggcggatctgcgccgctatgcctcttcttctgcggcgtctgacgccagcgagatgcgcgccaggctgctggaggattgccatctgctgttttgtcaggagattggcggacctgccgccgcgaggttgatccgccatcagatccatccgatgaaagcgccgccgggcacgacgattcaggctcagtgcgacgcggtaagcacgatgctggccggtcggctgccgccgtggctggcgaagcgcctcaaccgggataaccctctggaggaacgtgttttttaa

SEQ ID NO: 309 - DNA, 1407 bp, artificial
  Centroid sequence
atgacttcctgctcttctttttccggcggtaacgcctgtcagtcggcggacgccagcgcgttagcgccgcgggtggccgacaaggtcgccgcgcacccctgctactcccgcagcgggcaccaccgtttcgcccggatgcatcttccggtcgccccggcctgcaatctgcagtgcaactactgcaaccgtaaattcgactgcagcaatgaatcccgtcccggggtgtcatcgacgctgctgacccccgagcaggcggtgttgaaagtgcgccaggtggcccaggccatcccgcagctgtcggtggtcggcatagccgggcccggcgatccgctggccaatatgacccgcaccttccgcaccctggagctggtccgcgaccagcttccggacctcaaattatgcctgtcaaccaacgggctgatgctgcccgacgcggtcgatcgcctgctggaggtcggcgtggatcacgtcacggtgaccatcaataccctggatgccgatatcgccgggcaaatctatgcctggctgtggctcgacggcgaacgctaccgcggccgggaagccggggagatcctgattgcccgccagcttgaaggagtccgcaggctgaccgccgcgggagtgctggtcaagataaactcggtgctgatcccggggatcaacgacggcggcatggctgaggtcggccgtcgtttgcgggaaagcggcgcgtttattcacaatattatgccgctgattgccagaccggagcacggcacggtctttggtctcaacggccagccggagccggacgccgggatgctcgccgcgatccgcagccagtgcggggaggtgatgccgcagatgacccactgccaccagtgccgtgccgacgccatcggcatgctgggcgaagatcgcagccagcagttcacccggctgccggacccggacagcctccccgactggctgcccatcctccaccagcgcgccgaacttcatgccagcctcgccacgcagggggagtcggacgcggatgacgcctgtctggtggccgtggcctcccgccacggcgaggtcattgactgtcattttggccatgccgaccgcttctcgatctacagcctgtcggccgccggtatggtgctggtgggcgagcgctttacaccgaaatattgccgcggcgaagaggagtgtgagccacaggagaacgaggccagactggcggcgctgctggcgctgctcgccgacgtgaaagcggtgttctgcgtgcgtatcggccatacgccatggcagcaactggaattgcagggcattgagccgcaggtggacggcgcgtggcattcggtcgccgaggtgctgcctgcctggtggcagcggcggcgccagagcctggcggcatcgcgcctgcgtcagggggtcgcctga

SEQ ID NO: 310 - DNA, 1374 bp, artificial
  Centroid sequence
atgaagggaaaggaaattctggcgctgctggacgaacccgcctgcgagcacaaccagaagcaaaaatccggctgcagcgcccctaagcccggcgctaccgccggcggctgcgccttcgacggcgcgcagataacgctcctgcccatcgccgacgtcgcgcacctggtgcacggccccatcggctgcgcgggcagctcgtgggataaccgcggcagcgtcagcgccggcccggccctcaaccggctcggctttaccaccgatcttaacgaacaggatgtgattatgggccgcggcgaacgccgcctgttccacgccgtccgtcacatcgtcgaccgctatcatccggcggcggtctttatctacaacacctgcgtaccggcgatggagggggatgacctggaggccgtctgccaggccgcacagaccgccaccggcgtcccggtcatcgccattgacgccgccggtttctacggcagtaaaaatcttggcaaccgaatggcgggcgacgtgatgctcaggcaggtgattggccagcgcgaaccggccccgtggccggacaacacgccctttgccccggcccagcgccacgatatcggcctgattggcgaattcaatatcgccggcgagttctggcaggtccagccgctgctcgacgagctggggatccgcgtcctcggcagcctctccggcgacggccgctttgccgagatccagaccctccaccgggcgcaggccaatatgctggtgtgctcgcgcgcgctgatcaacgtcgcccgggggctggagctgcgctacggcacgccgtggtttgaaggcagcttctacgggatccgcgccacctccgacgccttgcgccagctggcgacgctgctgggggatgacgacctgtgccgccgcaccgaggcgctgatcgcccgcgaagagcaggcggcggagcaggcgctggcgccgtggcgcgagcagctccgtgggcgcaaagtgttgctctacaccggcggcgtgaaatcctggtcggtggtctcggccctgcaggatctcggcatgaccgtggtggccaccggcacgcggaaatccaccgaggaggacaaacagcggatccgtgagctgatgggcgacgaggcggtgatgcttgaggagggcaatgcccgcaccctgctcgacgtggtgtaccgctatcaggccgacctgatgatcgccggcggacgcaatatgtacaccgcctggaaagcccggctgccgtttctcgatatcaatcaggagcgcgagcacgcctacgccggctatcagggcatcatcaccctcgcccgccagctctgtctgaccctcgccagtcccgtctggccgcaaacgcatacccgcgccccgtggcgctag

SEQ ID NO: 311 - DNA, 1386 bp, artificial
  Centroid sequence
atggcagacattatccgcagtgaaaaaccgctggcggtgagcccgattaaaaccgggcaaccgctcggggcgatcctcgccagcctcgggctggcccaggccatcccgctggtccacggcgcccagggctgcagcgccttcgccaaagttttctttattcagcatttccatgacccggtgccgctgcagtcgacggccatggatccgaccgccacgatcatgggggccgacggcaatatcttcaccgcgctcgacaccctctgccagcgccacagcccccaggccatcgtgctgctcagcaccggtctgacggaagcgcagggcagcgatatcgcccgggtggtgcgccagtttcgcgaggcgcatccgcgccataacggcgtggcgatcctcaccgtcaataccccggatttttttggctctatggaaaacggctacagcgcggtgatcgagagcgtgatcgagcagtgggtcgcgccgacgccgcgtccggggcagcggccccggcgggtcaacctgctggtcagccacctctgttcgccaggggatatcgaatggctgggccgctgcgtggaggcctttggcctgcagccggtgatcctgccggacctctcgcagtcaatggatggccacctcggtgaaggggattttacgcccctgacccagggcggcgcctcgctgcgccagattgcccagatgggccagagtctgggcagcttcgccattggcgtgtcgctccagcgggcggcatcgctcctgacccaacgcagccgcggcgacgttatcgccctgccgcatctgatgaccctcgaccattgcgatacctttatccatcagctggcgaagatgtccggacgccgcgtaccggcctggattgagcgccagcgtggccagctgcaggatgcgatgatcgactgccatatgtggcttcagggccagcgcatggcgatggcggctgagggcgacctgctggcggcgtggtgtgatttcgcccgcagccaggggatgcagcccggcccgctggtcgcccccaccagccaccccagcctgcgccagctgccggtcgagcaggtcgtgccgggggatcttgaggatctgcagcagttgctgagccaccaacccgccgatctgctggtggctaactctcacgcccgcgatctggcggagcagtttgccctgccgctgatccgcgtcggttttcccctcttcgaccggctcggtgagtttcgtcgggtccgccaggggtacgccggcatgcgagatacgctgtttgagctggccaatctgctgcgcgaccgccatcaccacaccgccctctaccactcgccgcttcgccagggcgccgctccccagtcggcttcaggagacgcttatgccgcccattaa

SEQ ID NO: 312 - DNA, 258 bp, artificial
  Centroid sequence
atggagtggttttatcagatccccggcgtgggcgacctgcgctccgccgatgcgttctttcagtttttcgccgttccctaccagcccgagcgcctggcgcactgcagcctgccggtgctggccacctttcaccgcaagctgaaggcggaagtgcctctgctcaaccagctggaggataacccgcgcgcgcactggctgctggcgcgccgactgctggcggagagttatcagcaacagttcgaggagaacacgccatga

SEQ ID NO: 313 - DNA, 1449 bp, artificial
  Centroid sequence
atgaccaacgcaacaggcgaacgtaaccttgcgctcatccaggaagtcctggaggtgtttcccgaaaccgcgcgcaaagagcgcagaaagcacatgatgatcagcgatccgcagatggagagcgtcggcaagtgcattatctcgaaccgtaaatcgcagcccggggtgatgaccgtgcgtggctgcgcctatgcgggctcgaaaggggtggtgtttgggccaatcaaagatatggcccatatctcgcacggccccatcggctgcggccagtactcgcgcgccggacggcgcaactactataccggcgtcagcggtgtcgacagcttcggcaccctgaacttcacctctgattttcaggagcgcgatattgttttcggcggcgataaaaagctgaccaaactgatcgaagagatggagcagctgttcccgctgaccaaagggatcaccatccagtcggagtgcccggtgggcctgatcggcgatgacatcagcgccgtggccaacgccagcagcaaggcgctggataaaccggtgatcccggtgcgctgcgaaggctttcgcggcgtatcgcaatcgctgggccaccatattgccaacgacgtggtgcgcgactgggtgctgaacaatcgcgaagggcagccgtttgccagcaccccgtatgatgttgccatcattggcgattacaacatcggcggcgacgcctgggcctcgcgcattctgctggaagagatggggctgcgcttagtggcgcagtggtccggcgacggcaccctggtggagatggagaacaccccattcgttaagcttaacctcgtccactgctaccgttcgatgaactatatcgcccgccatatggaggagaaacatcagatcccgtggatggaatataacttcttcggcccgaccaaaatcgccgaatcgctgcgcaagatcgccgatcaatttgatgacaccattcgcgccaatgcggaagcggtgatcgccaaatatgaggggcagatggcggccatcatcgccaaatatcgcccgcggctggaggggcgcaaagtgctgctgtacatgggggggctgcggccgcgccacgtcatcggcgcctatgaggatctcgggatggagatcatcgccgccggctacgagtttgcccataacgatgattacgaccgcaccctgccggacctgaaagagggcaccctgctgtttgacgatgccagcagctatgagctggaggccttcgtcaaagcgctgaaacctgacctcatcggctccgggatcaaagagaaatatatcttccagaaaatgggggtgccgttccgccagatgcactcctgggactattccggcccctatcacggctatgacggcttcgccatctttgcccgcgatatggatatgaccctgaacaatccggcgtggaacgaactgactgccccgtggctgaagtctgcgtga

SEQ ID NO: 314 - DNA, 936 bp, artificial
  Centroid sequence
atgaaaaagtcgcttttcgccggggcaaccctgacggcactggtcagcggccacgcgctggccaatgaaccgctgacgctggtcctggactggtacattaaccccgaccatgcgccgattatggtggccgagcagatcggcgcctttaaggctcaggggctggacgtcaagattgtccctccctccgatcccgcgctgcctccgcgcatggtggccgcccgtcaagcggatctggccatcacctaccagccgcaggtgcacttttttgctgacgaagggttaccgctggtgcgtgtagggacactgattaattcgccgctgaatacggttatcgccctggataagcagatcaaaaccccggcagatctgcaaggcaagaaggtgggctactcggtcagcggcattgagcaggccaccctgtcgaccatggcgcaacacgcggggatcgatccggccagtatcaaactggttaacgtcaatttccagctgaccagcgccctgctggcgggccaggtggacgcggtcatcggcggctaccgtaatatagaagcgcaggagctgaagctgcagggcaaaacgccggtagtgatgaacgtcgaagattacggcgtgccggcctatgacgagctggtgattgtcgcccatcgcgacgcgattcatgaggccaagatccgtaaattcctcaccgccctgcaggccggagtgagctatctgcgcgcccatccgcaggagtgctgggaggcgtttgccgccgcccacccggagcttaggaccgaactcaaccaccaggcgtggctgcaaaccgtgcccctgttcgccaccgatccggcggcgctggataaaccgcgctacgaagcttatgaacagtttttatataacaataagttggtgaaaaaagtcacacctttaacaaattatgcggtggaactgcattga

SEQ ID NO: 315 - DNA, 1233 bp, artificial
  Centroid sequence
atgataacgtcaaataaaaattactttatcagctgtctgtttttcctgttcttctttataggttggggatgctgctacccttatttatccctgtggttgacggaaaccatcggtattaactacacagacgtcggcctggtttattctttcaccgccattgtcgccgtctgcgttcagccattattcggcttcatctccgataaactggtgtatcgtaagaatctgatgtggatgctggcgattattatcacgttattcgccccttactggatttatgtctttgctcccctgttaaaaataaatgtgttcctcggcgcgctggctggcggcctttatattggcatggcctacggcgccggctgcggggtttgcgaagcctacattgataaagtcagccgcgcctccggtttcgaatttggccgggcgcggatgttcggcggcatcggcgccgcaatcggcacctttgcggcaggaaaactctacggcattgatcagaatatgattttctggttggccagcggcgcaggcgtctgcctgctggtcattgtctggaaaatgcagatcagcgcccacccgcagcagggattgctgtctggcaaagcctcgccggttaccctccgcgatgccgtctcgctgttaaaagttaaaaaattctggttcttcgccctctatgtcattggcgtcggggcggtctatgaaacctatgaccagcagttcgctatctactacagccatttttttgagagtaaagcccggggtgcagaagtcttcggttatttaaccacgggtcagattttccttgatgccatcgtgatgttctttgcgccatggtttgtgaataaaatcggcccgaaaaatgcgctgttatactgcgggctgattatgagcttgcgtattatcggctccgcgtgggctattggccccgtctccatcagtctgattaaactcctccacggctttgaaagctcggtgctcctcgtcgcggcgctaaaatatattaccgctaactttacccctctgctgtcagcgaccgtttacttaattggcttccagttttcgaaaagctttagctctatttttctctcaaccggtatcggccatatgtaccagagcatgggctttaccagtagctatatcgtactcggcggtatcgctctgtgcttcacgcttatttcttttattacgctggataaagcgcgtgtcttctcttcacaaccggtgcccgcgaattaa

SEQ ID NO: 316 - DNA, 723 bp, artificial
  Centroid sequence
atggctgaacaacagccccgcccggttctgatcacaggaggaggccgccgcatcggtctcgcgctggcacaccattttctgctgcaacaccagccggtcatcgtcagctatcgcacgccctatccggcgatcgatggcctgcgcgacgcgggcgccctctgtctgcaggccgatttcagcagcgatgacggcatactgaccttcgccgaagcggtcaaatcgcacaccagcggcctgcgcgccatcatccacaacgccagcgactggatggcggagaagccgggagttgcgctgagcacagtgatcaaccgcatgatgcagatccacgtccatgccccctatctgctcaaccacgcgctggaggatctgctgcgcggccacggccatgccgccagtgatattatccatattaccgattacgtcgtggagcgcggcagcgataaacatatcgcctacgccgccagcaaagccgcgctggacaatatgacccgctccttcgcccgcaagctggcgccggagatcaaggtcaacgccatcgccccgtcgctgattatgtttaatgagggtgacgacgaagcctatcgtcagcaggcgctggataaatcgctgatgaaaatcgccccaggcgaaaaagagattagcgaccttatcgactatctgtttaccagccgctacgtcaccggccggtccttcgccgtcgacggcggccgcccgctgcgctag

SEQ ID NO: 317 - DNA, 1056 bp, artificial
  Centroid sequence
atgttttccgcgttgtgccgccgtctgcttccgctggcgctcggcaccggttttgtttttgctgccgcccccgcattcagcgcgctgggcgacaccgccagtagccaggcccgccatatcgccaccgtcttcccgggacgaatgaccggaacgccgccggaaatgctctcagctgactatctgcgccagcagttcgccctgatgggttatcagagcgacgtgcgaagcttcaatacccgctatatctataccgacagcaatcagcgcaagaactggcataacgccaccggcagtacggtgatcgccgcccatgaaggtaaagtgcgccagcagattattatcatggcacacctcgacacctatgcgccgcagagcgataaagacgtggagaacaacctcggcggcctgacgctgcagggcatcgacgacaacgcgatgggacttggcgtattgctggagctggcggagcatttaaagaacgtccctacccgctatggcatccgctttatcgccaccagcggtgaagaggaaggccgtctcggcgcgcaaaacctgctgcagcggatgagcgaagcggaaaagaaaaataccctgctggtgatcaatctcgataatctggtggtgggcgataagctttacttcaacagcggccgcagcacgccggcctcggtgcgcaagctgacccgcgatcgcgcgctggctatcgctcgcagcaagggcatcgccgcctacaccaacccgggactcaacccggcttatccgaaaggcaccagctgctgcaatgacgccagcgtcttcgacaacgccgggatcccggtgctgtcggtcgaggcgactaactggtcactcggcaaaaaagatggctatcagcagcggagcaaatcggccagtttcccgcagggaaccagttggcatgacgtccagctggataatcagcagtatatcgaccacgcgctgccggggcgcatcgaacaccgcggacgcgaggtagtgaaagtcatgctgccgctggtgaaagagctggcgaaggtggagaagccatcgtcattaaaataa

SEQ ID NO: 318 - DNA, 1626 bp, artificial
  Centroid sequence
atgacattacaccaaaacaatcacatcacgcggacgctcctggcaatgagtctgatggtcataaccggcggggcgctggcggcgcaggtgccgccgggcacccagctggcggaaaagcaggagctggtcagaaataacggcagtgaacctgcctcactcgatccgcataaagtcgagagcgacattgaattcaacatcattagcgatctctttgaaggactggtcagcgtgacgcctgcgggggcgatccagccccgactggcggagcgctgggaaaacaaggacaacctgttatggaccttccatttacgccccggtctgacctggtccgacggcacggccatcacggcgcaggatatcgtctggagctggcaacggctggtctcgccggccaccgcctcgccctatgcgagctatcccggcaatatgcatatcgccaacgcccgcgaaattgccctggggcaaaagggccccgagacgctgggggtgaaggcgctgaacgacaccacgctgcaggtcaccctgagccagccaaacgctgccttcctggcgatgctggcgcacccttcgctggtaccgatcgacaaagtgctggtggagcgttttgccgataaatggacccgaccagagcatatcgtcaccagcggcccgtataagctgacccaatgggtggtgaatgagcggctggtggctgaacgtaatgcgaagtactgggataatgcgcacaccgttattaataaagtgacttacctgcccatctcttcggaggctgccgatgtcaaccgctacaaagcgggggagatcgatattgtttatacggtgccgatcaatcagtttgcgcagttgcagaaaaccatgggcgatcagctggacgtttcgccgcagctggcgacctattactacgaattcaatactacccgcccgccgtttaacgacgcccgcgtgcggcgcgcgctgaatatggcgcttgataaagatatcattgccggaaaagtgcttggccaggggcagcgcccggcctgggtgatcagccagccggatatcggcggcgtgacgctgcgcaacccggactacgccagctggccgcgcgagaagcggattgctgaggcgaaaaaactgctggtgcaggcggggtatgatgacagtcacccattggtctttaccctgctgtataacacctatgagtcgcaccagcgtatcgccatcgccgccagctctatgtggaagaaaaacctcggtgtcgaggtgaagctgcagaaccaggagtggaagacgatgctggataccatgcatacgcataactttgacgccgtccgctatgcctggatcgccgattacgacgatgccgccactttcctcaatacgttccgtaccggtgatagcgagaacaccagtcagtacagcaacccggcttacgatgaggccctgcgcaatgcggcgaaagcctccgacgtagcgacccggggcaaatactatcagcaggcggaagatctgctggcgcaggatgttcccgccattccggtctatcactatgtgcgtacccatttagtgaaacccagggtgggcggtttcacgccggataagctggggtattactacaccaaagacatgtacattaaaaaatag

SEQ ID NO: 319 - DNA, 963 bp, artificial
  Centroid sequence
atggctattttgtccattggatttgcttgtttcgatcagtttttctttctcaatgaatggcctcaggagaataccaaaaacttttgtcatgattttatagaaagcggcggcggcccagcggccaatgcggcatggctgctgggattatggggtgaggaagtctattacattggtcatctgcatcaggacctttacggtcagcgcattatcgatgagtttgccgaagcgggcgtggataccagccaggtggttttttccgatgacatgatcactccgctggcctcggtgctggtcaatcgcttaacgggttcgcggacgattattacccgcaagatgcaaacgccaccttccctgacctacgatcaaaagctcaaactggacgacctcgccgagcggctgattgccagcgaggagccggtcaccattttaattgacggccatgaggcagaaatcagtgaatatttaatcaagaaactgccccacgccaaagtcgtgatggacgggggttcactgcgtgccagcaatattaaactggcggcctggactgactattttgtcgtaagcgaacattttgcccgcgattatatgagctatcgttcactgagcaccgaagcagacattaaagcggccctgattgaactgaataaaatttgccgcggcgaggcgtttatcacccttggcgaaaaaggctgcgccttcttaaagagcggtatgctgcagatcgtcccgtcctggctgtgcaatgccgttgataccaccggcgccggggatgtttttcacggtgcctttacctatggcgtccattattcgtggcatatagataatattattttatttgccagcctgaccgccgctatttctattgagaaaaaaggggtacgggaatcgatgccggatctggcggtcgtccaccactcgctaaatagctacgagagaaacttaaagcaatattttgaagaataa

SEQ ID NO: 320 - DNA, 1719 bp, artificial
  Centroid sequence
atggaaaaacatctgttgattagcaagggctgtaagggctggggtgggcctctgactatcacgctgggtcagggaaaaaagattgcgtacattaccggggggatccgtcccccggtcgtggaccgcctgagcgaactgaccggctggccctccattgatgtattcaaaaatggcgaaccgccggcagaagagattggtttaatggtcatcgactgcggcggcacgctgcgctgcggactctatccgaagcggggaattcccaccattaacctgcatcccaccggcaaaagcggcccgctggcggaatttatacacgaagggatctacgtctccggggtgacgcctgcctgcattgagatggtctggccacaaggggaaggcggaaagcttgggatcgtggctgacgatttgaccggggcgaccaccgtcggggtgctgctggcacgtagcggtttaaaaaccgccgcgtttttcgataccgaatccttctcccgcaatgaggtcgagtatccggcgatggtcgtcagcagcgacagccgcccattgccgaaagcggaggcccagcacaaagtgagcgctgcggtgaaacagctgcaggctcgcggcgcgcactacttcaccaagcggattgataccacgctgcgcggcggcatcggatttgaaatcgatgccatgctggaacaactgccgcaggagacggtggcggttgtggtgccggcgatgccgcagtcacggcgtattctcgtcggcggttattcggtgattgattcggtagccctgtcgcggaccgatgtggctcgcgatgtacgtaccccggtcaccgagtcgtgggtgccgggactgttggcggcgcagacccatcatcaggtcgggcatatcgcgctgacgtcggtgatgaaaggcgaagggcaaatccagcaggatttgcaggagcaacagcaacgcggcgtgcgggtgatagtggtcgatgcgataaccgtcgacgatgtcgatgccatcgccggggcggtagtggccctgaactggaacgtgctggccgtcgatccggggccctttaccgaacggctggcggttcgtcgcggcctgatgcgcgaagcgcggagcagcgcgcccgcgagcctgacagcggacggccagcgcggctcgattttgatcgttgccggcagcgcaacgccagtaaccaaaaaacagctccagtatttgatcgccagggatgaccgggtctgccatatcccggttgatgccgagctgttggttgacaggaaaaacgccgctgagattgaagtcaatcgcgtggtacagcatgcccgacagtgcgttccggcgcagcacaacgcgctctttgtttttgaatccgccttgaccgggcggttgctaaaccttcaggaagaggagcagagatttggtctggcccacggtgaggctgcgcaaaatattaaccacggattgggcagtattgtacgcgaggtgcttaactgtgcgtcgggtgaaattaaaggattgtatatgaccggcggtgacaccatggtcaatgtcctaaaagagctgggcgcgaccggaatagaaatgattgactatgtcatcccgcaaaccgatatggtgcggattattggtggtgattatgccggcttaatttgtgtcggaaaaggagggttaaccggaccggaagatattattggcatcattgttgaccgaatttatcaagaagcacagcaataa

SEQ ID NO: 321 - DNA, 447 bp, artificial
  Centroid sequence
atgcgtaccattctgaatattttgaactttatccttggcggtttcgccaccactctaggctggctgctcgccacgctggttagcatcgttctggtcgtcacgctgccgctgacccgctcctgctgggaaatcacccgactctccttatttccatacggtaacgaggctattcatgtggatgagctggagccgggccgtaaaaatggcctcctcaacgccggcggcaccgtgctgaatattctgtggttcatttttttcggctggtggttgtgcctgatgcatattttcagcggcatagctcaatgtctgaccattattggcatcccggtggggatcgcgaactttaaaattgctgccattgccctttggccggtaggacgtcgggtcgtctctgtggaaaccgcgcgtgccgcacgtgaagccaatgcgcgtcgtcgctttcagtaa

SEQ ID NO: 322 - DNA, 495 bp, artificial
  Centroid sequence
atgaatatgaaaagcattgaagatgtatttatccacctgctctcagatacctacagcgcagagaaacaattaacccgcgggctggctaaactggccagagcggcgtccagtgaaaaactcagcgcggcgttcaatgctcatctcgaagaaacccagggccagattgaacgtattgaccagattattgagcaggaatccggcctgaaaatcaaacgcatgaaatgcgtggccatggaaggattaatcgaagaggccaatgaagtcgttgagagcacggaaaaaaatgaggtacgagatgctgcgctaattgccgctgcgcaaaaggtcgagcattacgaaattgccagttacggcaccctggtcaccctggcagaacagctgggctataaaaaagcggtcaaattgctggccgaaacgctggaagaagaaaagcaaaccgacgttaaattaaccgatttggcggtaggtaacattaataaaaaagcggaaaaataa

SEQ ID NO: 323 - DNA, 2484 bp, artificial
  Centroid sequence
atgatgtctgcgctattcaatgctccagccatatcgtttgcggatgagttttttaatcctgctttgcttgaggttcgcgaaggagaaggtgcgccgacgacagacctctccgtatttgaagtcgtcaatggacagccagcaggaaactaccgggtagatatctacgtcaataacgaaatggtgaccgcagatgcccgcgatgtgatgttttcaaagaaccaggatgggaagctggagccctgcgtcacgttggcagaactcagccaatggggagttgatacggcctcatttccagaactcgccgtcagtgatagcgaatgcgccaatcttgcgggcatccctgatgcatttgccgacttccagtttaaccgccaaaagctgaatctgagtatccctcatgcggcaatgaatacgcgcagcctggatgaagtgcctattgaacgttgggatgaaggtattccagcccttctcctcaattacaacatgaatagctatcagagccgatataagggtgcagaaacttacgaaagcacgtatttgaacctgcgtcccggtctcaatatcggtccctggcgtctgcgcaactacaccacctttgagcatagtaatcagagtggaagtaaatgggacaacgtctatagctatcttcagcggaatattgtctctttgcgaagccaactgacgttaggcgacagttcagcaccagctgatgtcttcgatagcgtgccgtttcgtggttttcagatggcctcggatgatgacatgctgccttccagcgtacgtaactatgcgcctgtgattcgaggggttgcccgcagcaatgccctggtcaccatccgtcagaatggttacgttgtctatgagaccaaagtggcgccgggggcgttcgagatctccgatttggcctccaccggaggagcaggcgatcttgacgtgaccatcaaagaagccgacggcagcgagcagcacttgcgcatcccctacgcatctttgcctgttctacagcgtgaaggtaagtttcgctatagcgttacgggcggtcaattccgcgcctacgattctcacacggaaaaaaacctgtttgttcagggcaccggaatttatggccttccgtggggctttacgctctacggcggcgtgcaaaatgcaggcaataaatatcagtcatatgcgttgggggtgggtaagaatatcggtagctggggcgccttttccgccgacgccatccattcccgatccatgtcgaccgatgccggcaggcaacagggccagtcgctccgggtgcgctatagcaaaaatttcctgcagacgggaacaaattttaccatcgccggctatcgctattccacctccggatttcgctcgctggaagaaacgctgggtacctaccgtagcgataataacattccttcttatatcaccgatcgccggcgtaaccgggctgagctgtcgctgaatcaggatcttggcgataactttggggcgttgaatgcatccttgatcagcgaggattactggcagaacgaacgtaacagcctgtcggcaaatctgggctattacaaaaatttcaacgcgattggtatcagtctgaactactcctggaaccggaataccgggctctatggccatgccgaacaggataatgtggtctcctttgagatcaatgtgccgctggacaaattcctcaaccggacatacgcctcatacgggacaacccatgcgagtggaaacggaaccagccacaacctccgactgaatggttcagcctttgatgatgccagtcttgactgggggataaacgcgacgcttgcggggcgcagcgaacaacaagtcgtcgggggtaacgtcagctggaaggcaagccacggaacgttaaatggttcctacagccgcagccgcgacagccaacagctggggtatggcatagccggtggggtagtgattcatgagaatggtatcacgctgtcccaatccctgggtgaaactattggtttagttaaggctcctggcgcagaaggcattggcgtcaataactacgccggtatctctacggatagtcggggttacgcggttgttccgtatctgaccccctatcgccgcaatgatattagcctgaatagtaaaaccctgcgggacgataccgatatcacctatatgaccaataaagtcgtccccacccgcggggctatcgttagagcagagtataaaaccgccattggccaccgtgtcctgatgacgttaacgcggcctgggggaaaaccggtcccctttggcgcgatggcgtcgctgcttaaaagtgaagaaaacgcgtcaattgtcggtgacggcggagaagttctgctgagcggtttaccgcaaaaagggacgctgcaggtgaaatgggggaatggccaggggcaggaaaccacctgtcgggcggattatatagcccataaatctgctggcgcgtccggtctctggaacgcgacgagcgtctgtcaataa

SEQ ID NO: 324 - DNA, 1008 bp, artificial
  Centroid sequence
atgtcagcagagaaaaaacccgttgtggcgattaccatcggcgatccggcagggatcggcccagagatcacagtggccaccatgatggacaaaagcgtgtatgacgagtgcaaaccgttcctgatcggctcggtaccgattatcagccgggcgatgaaaatcatgggctgcgattttgctatccataaaattgctcatcctcaggaggcccgtttcagctgggggacgctggatgtcctggaaaccggcgactacgactgcgacagcatcgaatggggcaaggtgcagaagctggcggggcaaatgtcgctggactatgtgatgaagtcgatcgaactgggcaaagcggggctgatcgacgtggtctctactgcacctattcataaggaagccatcaagctggcgggatgtaagctcccgggccataccgaaatctatcaggtggaaacccaatctgattatggcttgactatgttccacgtccacaacctgcgcgtcttcttcgtgagccgccatatggcgctaaaagctgcctgtgactatgccaataaagcgcgggtgctggcctgcgttcagcagatccatcatgaatttactgccctgaacatcaacaatccgcgtattgccgtggccgccctgaacccgcatggttccgacaacggtctttttggtcacgaagaggcagacaatctgatcccggcggtgaaagcggcccaggagatggggatcaacgctatcgggccggtaccggccgattccgtgttccatctcggcaaacaggggcgctacgacgccattctctcgctgtatcacgatcaggggcatatcgcctgtaaaaccctcgactttgaacgttcaatcaccattaccttcggcctgccgtttatgcgcagctccgttgaccatgggacggcgtttgatatcgccggtaccggtaaggcgggtactgtcagtatgctggagtcgacgctggtggcggcccgttactggaaaatgaagcatcaataa

SEQ ID NO: 325 - DNA, 3516 bp, artificial
  Centroid sequence
atgtccggaaacatgaaaacaatggatggcaacacggcggcggcctggatctcctacgcctttaccgacgtggcggccatctaccccatcaccccctccacgccgatggcggaaaatgtcgatgaatgggccgctaaggggaaaaagaatctgtttggccagccggtgcgcctgatggagatgcaatccgaagccggtgccgccggggcggtccacggcgcgctgcaggcgggagcgctcaccaccacctacaccgcgtcgcaggggctgctgctgatgatccccaatttgtacaaaattgccggtgaactgctgccgggtgtttttcacgtcagcgcgcgggcgctggcgaccaattcgctgaatatttttggcgaccatcaggacgtgatggcggtacgccagaccggctgcgccatgctggtggagaataacgttcagcaggtgatggacctgtcggcggtggcgcacctggcggcgatcgccgggcggatcccgtttatcaactttttcgacggctttcgcacctcgcacgaaatacagaagattgaggtgctgacgtatgagcaactggcgacgctgctggaccgcccggcgctggagcgctttcgtcggcaggcgctgcacccggatcatccggtgatccgcggcaccgcgcaaaatccggatatctacttccaggagcgggaggcgggtaaccgcttctacctcgcactgcccgatctggtggaaagctatatggcgaagatcaccgcgctgaccgggcgggaatatcacctgtttaattaccacggcgcgccggatgccgagcgggtgattatcgccatgggctcagtgtgcgacaccgtccaggaggtggtggagacgctgaatgcggcgggggagaaggtggggctgctcagcgtccatctctatcggccgttctcgctggcgcactttttcgcgcaactgcccggcagcgtgcagcgtattgccgtccttgaccgcaccaaagagccgggggcgcaggcggaaccgctgtgcctcgacgtcaagaacgccttctatcaacgcgacgatgcgccgctgatcgtcggcggccgctacgcgctcggcggtaaggacgtgctgcccaacgatatcgccgcggtgtttgacaacctcaggcagccgctgccgaaggacggatttaccctgggtattgtcgatgatgtcacttttacctcgctgcccgcccggcaggaaccgctggcggtctcccatgccgggatcaccgcctgtaaattctgggggatgggctcggacggcaccgtcggggcgaacaaaagcgccatcaagatcatcggcgataacacgccactctacgcccaggcctacttttcctacgactcgaaaaaatccggagggatcaccgtttcgcacctgcgctttggcgatcggccgatcacctcgccctacctaatccaccgggccgattttatcgcctgctctcagcaatcctatgtcgaccgctacgatctgctggaggggctgaagccgggaggcacctttctgctcaactgcagctggtccgaggcagagctggagcagcacctgccggtcagcgtccggcgctatctggcgcaggaaaagatcgacttttatacccttaatgcggtggacattgcccgcgagctgggcctcggtgggcgctttaacatgctgatgcaggcggcgttctttaagctgacggcgattatcgatccgcaaacggcggcagactatctcaagcaggcggtggagaaaagctatggcagcaaaggggcgagcgtcattgagatgaaccagcgggctatcgagctggggatggcggcgctgcaccgggtgacggtacccgcccactgggcgaccctcgaggcgccggcaccgcaggcgagcaccctgatgccggacttcatccgcgatatcctgcagcccatgaaccgccagcgtggcgacctgttgccggtgagcgccttcgccggaatggaagacggcacctttccctccggcaccgccgcctgggagaagcgcggcatcgcgctggaggtgccggtctggcagcctgacggctgtacccagtgtaaccagtgcgcctttgtctgcccgcatgcggcgatccgcccggcgttactgaacgctgaagagcaggacacggctcccgccgggctgctgagtaaacccgcccagggggccaaagactatcactatcatctggctatctcgccgctggactgctccggctgcggcaactgcgtggagagctgcccgtcgcgcggcaaggcgctgcagatggtctccctcgacagccagcgtgcgatggctccggtctgggattacgccctgggactggcgccaaaagataacccgtttcgcaaaacgacggtcaaaggcagccagttcgaaacgccgctgctggagttttccggcgcctgcgcgggctgtggagaaacgccctatgcccggcttatcacccagctgtttggcgaccggatgctgatcgccaacgccaccggctgctcttcgatctggggcgccagcgcgccttcgatgccctataccaccaaccatcgcggccacggaccggcgtgggcaaactcgctgtttgaggataacgccgagttcggtctcggcatgatgcttggcggccaggcgatccgccaacagatcgccgaggagctgaccgccgcgctggcgctgccggtcagcgacgcgcttcacgccgcgatgcggcagtggctggcgcagcaggatgagggggaggggacccgcgagcgcgcggaccgcctcagtgcgttgctggcggcggaaaaagagggcgtcccgctgctggagcagctctggcagaaccgcgactatttcgtccggcgttcgcagtggatcttcggcggcgacggctgggcctacgatatcggctttggcggcctcgatcatgtgctggccagtggggaagacgtcaatattctggtgtttgataccgaggtctactccaacaccggcggccagtcgtccaaatcgaccccggtggcggcgatcgccaaatttgccgctcaggggaaacgtacgcgtaaaaaagatctcggcatgatggcgatgagctacggcaatgtttacgtcgcccagatcgccatgggcgccgataaagatcagaccctgcgggccatcgccgaggccgaggcctggccgggaccgtcgctggtgatcgcctatgccgcctgtatcaaccacggtctgaaagccgggatgcgctgcagtcagcgcgaggcgaagcgggcggtggaggcgggatactggcacctgtggcgctatcatccgcagcgggaagccgagggcaaaacgccgtttatactggactccgaagagccggaagagagtttccgcgactttttgctcggcgaggtgcgctacgccgcgctgcacaaaaccacgccggatctggcggacgcgctgttccggcaaacggaggacgatgcccgggcccgtttcaggcagtatcagcggctggcgggagaggagtag

SEQ ID NO: 326 - DNA, 720 bp, artificial
  Centroid sequence
atgatgacggtgctcatcaccggcgccagctccgggatcggcgccggtctggcgaaatccttcgcggcggatggccatctggttatcgcctgcgggcgcgatgcttcgcgcctggcaacgctccagcagttcagccccaacatcagtgtgcgcctgttcgatatgacagacagggacgcctgtcgccaggcgctgacgggctgttttgccgacctgatcattctctgcgccgggacctgcgaatacctcgaccacgggcaggtggatgccgccctcgtggagcgagtgatggccaccaactttctcgggccggtgaactgcctggcggcgctgcagacgcagctggaggcaggcgatcgggtggtgctggtcagctcgatggcgcactggctacccttcccgcgcgcggaagcctatggcgcctccaaggcggcgctgacctggtttgccaacagcctgcgtctggactgggagccgaaaggggtggccgtcacggtggtctctccgggcttcgtcgacaccccgctgacgcgcaaaaacgacttcgccatgcccggccgggtgagcgtggatcgggcggtggcggcgatccgccatggcctggcgaaaggccaaaaccacattgccttccccaccggtttcagcctggccctgcggctgctggccagcctgccatcgggtatccagcgcctgctgttgcgcaggatggtgcgctcatga

SEQ ID NO: 327 - DNA, 339 bp, artificial
  Centroid sequence
atgaacaaaagcttagcaggaatactgggcgtcaccgtcgcgttaaccttactggcgggctgtaccgcttacgatcgtaccaaagaccagtttacccagccggtggtgaaagatgtgaagaaagggatgtcgcgtcagcaggtgatgcagatcgccggcaaaccttcaacggaagtcaccatggtccatgcccgcggcacctgccagacctatatcctcggtcaacgagatggtaaagttgaaacctactttgtggccctcgacgaaacgggtcacgtcatgaactccggctaccagacctgcgccgagtatgataccgacccgcgcaacgccaggtaa

SEQ ID NO: 328 - DNA, 951 bp, artificial
  Centroid sequence
atgagccagttagacgaactgaaaaaatacaccacggttgttgctgataccggcgatattgaatcgattaaaaagtttgcaccccaggatgcgaccaccaacccctcgctggtgctgaaggccgcgcagctgccgcagtatcagccgctgattgccgatgcgattggcaaggcacgccgccagggaggcagcgcagaaacgcaattgattaacgcctgcgatcaggtggcagtggatatcggcagcgaggcgctgcgccatgtgcccgggcgtatctccaccgaagtggatgctcgctttgcctgggatcgcgggatgtgcgtcgcgaaggcgcgcaagctcatccagttatatgaaaaaaatggcattggtcccgagcggattctaattaaactcgccgccacctgggagggcattcgcgctgccgaagagttggagcagagcggtataaactgcaacctgacgctgctgttctctttcgctcaggcccgggcgtgcgccgaagcgggcgtctttctcatctcgccctttgtgggccgcatctacgactggtatcagaagcaccagccgcagtcagcctatcaggtggacagcgatccgggcgtggtctctgtgcgccagatttatcagtattacaaatcccatggctatgacacggtggtaatgggtgccagcttccgtcgaattgagcagatccaggcgctggcgggctgcgatcgcctgactatctctccggcactgctggacgagctggcggccagcgaaggagtgttgacccgccagttgacccccggctgcgtgacggaaacccgtcccagcccgatgacgcaggcggagttcctctggcagcatcatcaggatcccatggcagtggaaaaactagcggaagggatccgactgtttgctgtcgatcaggtgaaactggaacaacagattcagcagatgctgtaa

SEQ ID NO: 329 - DNA, 939 bp, artificial
  Centroid sequence
atggaacaccgctttacttccctgccccccgatccctttatgtgcagcagcgacgaaaagcagagccgcagcccgctggcgctctactccgagtatcagcgtatggatatcgaactgcgcccgccgcacgccatgcccaccagccactggcacggccaggtggaggtcaacgtgccgttcgacggcgatgtagagtatttgattaataacgaagtggtgcgcattgagaaaggctatatcaccctgttctgggcctgtacgccgcatcagctgacccgccccggcgattgccagcagatggcgatattcaacctgccgatgcatctgtttctgtcgtggccgttggaccgggagcttatcaaccacgtcacccatggaatggtaattaagtccctcgccgcgcagcagttaagcgcctttgaagtgcgccgctggcagcaggagctgaaccacgacaatgaacagattcgccagctggcgatcgatgaaatcgccctgatgctcaagcggctgagcctctccggctggcagccgattctggtcaacaaaacctcgcgcacccacaagaacagcgtctcgcgccacgcgcagttttatgtcagccagatgctggagtttatcgccgcccactacgaccaggcgctgaccgtcaatgccgttgccgagcacgtgaagctcaacccgaactacgcgatgggggtctttcagcgggtgatgcagcagaccatgaagcagtatattaccgccatgcggatcaatcatgtgcgggcgctactgagcgataccgacaagaccatcctggatattgcccttactgccgggttccgctccagcagccgcttctacagcacctttacccgctacgtgggcatgccgccgcagcagtaccgtaaacttagccagcagcgacgtcacgggctggccttgccggaggcataa

SEQ ID NO: 330 - DNA, 963 bp, artificial
  Centroid sequence
atgattgaacaagactcagattacgccctgctcactgaaattgcggtggcttattacgatcaggaacaaacgcaggaagagatcgccaaacgattcggcatttcgcgtatcaaagtcgggcgcctgctgaaaaaagcgcgccaggaagggattgttgagatcagcgtcaaataccatccggtcttcagctcccagattgagcagcagtttatttcgcactttggcattaagcgcgcgctgattgccctggatcaccatgatgaagatgaacagcgccagcaggtggcggccctggtcagtaactatctggctggggtgttaaaaaacgatatgaccgtcaccgttggtcaggggcgcaatgtggccgcggtggcgaatcacgtcggtgtgtttcctgagcgccactgccgctttatctgcggcatcggcggaaccaagcgcgacaatcagctgatcgacgccgaccacatcagccggaatctggcgcgcaaatttaacggcttcagcgaaacgctttacgccccggcctatgtggaaaccccggagctgcgcgccgcctttatgcaaaaccgcctgattaaggccacgctcgaacaggccagcaaagctgacgtggcgatcattggcctcggcgatatgaatgaaaacagctttatggtccagctcggctggtttacgccgcaggaaattgccaccgcgcgtcaggaacagggggtggtgggcgatctggcggggtacagctttttcaatattcagggcaaacccgtcgatacggtgatgaatgaccgggtcattggcttaagtctcgaacagctgcgggccattccctgcgtcatcgctatcgcctccgaaagtacgaaagcgacggcgatcctgggggcattacgcaccggggttatcgatgtgctggctaccagcgcctcgaacgcccgttcggtcattaatatgcaaaaggcgctataa

SEQ ID NO: 331 - DNA, 636 bp, artificial
  Centroid sequence
atgaccgttatcaccagtaaccgacgcccggaagaggccgtctatcgccatgtgatcccggccggggaaccctggctgtttgaggttaaaaaagggcaaaccctgcgcctgctcgatctcgaaggcaatcaggcgattgataccctgttttacaacgccgacaacccgcgcgagcgctacgatgcgcagcgcacgctgcgtcgccaggggaacgcctacctgaccgccggcagcgtgctctattccaacctcggccatccgctgatgaccatcgtggccgatacctgcgggcggcacgataccctcggcggcgcttgcgcccaggagagcaacaccgtgcgctacgccctcgacaagcgctatatgcacagctgccgggacaattttctctgcgcctgtctgcacgatggccgcctgcataagcgcgatatcggcgccaacattaacttctttatgaacgtgccggtgacgccggagggcggtctgacctttgcggacggcatctcggcggcaggaaaatacgttgaactgcgcgcggagtgtaacgccatggtgctgatctccaactgtccgcagctcaacaatccctgcaatggctggaacccgacccccgccgaggtgctggtatggaactga

SEQ ID NO: 332 - DNA, 729 bp, artificial
  Centroid sequence
atgaccgtactttttcacgccactcccagcctgcgcgaagagcggcttcccggcggggcgcatacctcgctgattttgcgcaaagggcagatcctgcgcctgactgatatcgacggcggggcgaacgtcagcatgatgatgctcaacccccatgagaaaagtgagcgcctgaacctgccggataccctcaagggccagcataccgcgcgcctgaccgccggacactgtttctactccgatatgggccgggtgctggccgggatcgtcgccgacagctgcggctggcacgatccgttcggcggggtccttaacgccgaagagacacacgacaaatatggcgccggacgctaccaggaattacgtaatggcttctaccgcaatggcgtcgataacctgctggtggagatgggtaaatgggatctcggcctggaagatctgctgatggtggtcaacttcttcagcaaagtcaccgtcgatgacgagggccgtttccagtttgttgccggcaacagtcgcgccggggattacgttgagctgtttgccccgatggacgtcctgctggtgctcaccgcgctgccgcatccccaggatccggccacagaatatgccccccgtccggtgcagctgagctggtatcaggccgacgatgaggacgcggccatccaggcgctcctgacccgcgatgagaatcagcgcgcgttccgtaatacccaactttttgccctgtaa

SEQ ID NO: 333 - DNA, 1353 bp, artificial
  Centroid sequence
atgtctgccccaaaaattacttttatcggcgccggttcgacggtgttcgtcaaaaatattctcggtgatgttttccagcgcccggcgctgaaatcggcgcatatcgcgctgatggatatcgatgaaacccggctggaagagtcgcatatcgtggtgcgcaagctgatggattccgtgggcgcgaacggcgaaatcagctgccaccgcgaccggaaaaccgccctgcagggcgccgattttgtcgtcgttgccttccagattggcggctatgagccctgtaccgtcaccgattttgcagtctgcaagcgccacggcctggagcagaccattgccgatacgctggggccgggaggcattatgcgcgcgctgcgcaccatcccgcacctgtgggctatctgcgacgatatgagcgaggtctgcccggacgccaccatgcttaactacgtcaacccgatggcgatgaacacctgggcgatgtatgcccgctacccgcatatcaagcaggtgggtctgtgccactcggtgcaaggcacagcggaagagctggcgcgcgacctcgatctcgatccggcggatttacgctaccgctgcgcggggattaaccatatggcgttctatctgtcgctggagaaaaagctcgcggacggcagctacgtcagtatctaccccgacctgctacaggcctacgccgacggacgggcgccgaaaccgaacctgcacggcaacccgcgctgcgaaaacatcgtccgctatgaaatgctcaaaaagctgggctactttgtcaccgagtcctcggagcatttcgcggaatacacgccatggtttatcaagccgggccgcgatgaccttctcgctcgctataaagtgccgctggatgaataccctaaacgctgcgtcgagcaactggccaactggcatcaggagctggagagctataagcgcggggagcgcattgaggtgaaaccctcccgcgaatatgccagcaccatcatgaacgccatctggaccggcgagccaagcgtggtgtacggcaacgtgcgaaacgataatctcatcgacaacctgcctcagggctgctgtgtggaagtggcctgcctggtggacgccaacggcatccagccgaccaaagtgggcgcgctgccggcgcatctggcggcgctgatgcagaccaatatcaacgtgcagacgctgctcacggaggcgatcctcaccgaaaatcgcgattacgtctattacgccacgatgatggatccgcacaccgccgcggtgctggggatcgaagagatctacgcgctggtggacgatctgatcgccagccacggcgactggctgccggcctggctgcaccgttaa

SEQ ID NO: 334 - DNA, 1575 bp, artificial
  Centroid sequence
atgatccctgaatccgacccggacaccaccgtcagacgcttcgacctctctcagcagttcaccgccatgcagcggataagcgtggtgctgagccgggccaccgaggccagcaaaacgttgcaggaggtgctcagcgtattgcacaacgatgcctttatgcagcacgggatgatctgcctgtacgacagcgagcaggagatcctcagtatcgaagcgctgcagcaaaccggccagcagcccctccccggcagcacgcagatccgctatcgccccggcgagggactggtggggaccgtgctggcccaggggcagtcgctggtgctgccccgggtcgccgacgatcagcgttttctcgaccgcctgagcctctacgattacgatctgccgtttatcgccgtaccgttgatggggcctaacgcccggccaataggggtgctggcagcccagccgatggcgcgccaggaagagcggctgccggcctgcacccgttttctcgaaaccgtcgccaacctcgtcgcccagaccatccggctgatgatccttccggcctcacccgccctgtcgagccgccagccgccgaaggtggaacggccgccggcctgctcgtcgtcgcgcggcgtgggccttgacaatatggtcggcaagagcccggcgatgcgccagatcgtggaggtgatccgtcaggtctcgcgctgggacaccaccgtgctggtacgcggcgaaagcggcaccgggaaagagctaatcgccaacgccatccatcaccattcgccacgggctggcgccgccttcgtcaaatttaactgcgcggcgctgccggacaccctgctggaaagcgaactgttcggccatgagaaaggcgcctttaccggggcggtgcgtcagcgtaaaggacgttttgagctggcggatggcggcaccctgttcctcgatgagattggtgaaagcagcgcctcgttccaggccaagctgctgcgtatcctccaggagggggagatggagcgggtcggcggcgatgagaccctgcgggtgaatgtccgcatcatcgccgccaccaaccgtcacctggaggaggaggtccggctgggccatttccgcgaggatctctattatcgtctgaacgtgatgcccatcgccctgcccccgctgcgcgagcgtcaggaggacatcgccgagctggcgcacttcctggtgcgcaaaatcggccagcatcaggggcgcacgctgcggatcagcgagggcgcgatccgcctgctgatggagtacagctggccgggtaacgttcgcgaactggagaactgcctcgaacgctcggcggtgatgtcggagagtggcctgatcgatcgcgacgtgatcctcttcactcaccaggatcgtcccgccaaagccctgcctgccagcgggccagcggaagacagctggctggacaacagcctggacgaacgtcagcgactgatcgccgcgctggaaaaagccggctgggtgcaggccaaggcggcacggctgctggggatgacgccgcgccaggtcgcttaccggatccagatcatggatatcaccctgccgcgtctgtag

SEQ ID NO: 335 - DNA, 882 bp, artificial
  Centroid sequence
atggcaatgcgtcaatgtgccatctatggcaagggcggtatcggtaaatccaccaccacccagaatctggtcgccgcgctggcggagatggggaagaaggtgatgatcgtcggctgcgacccgaaggcggattccacccgtctgatcctgcacgccaaggcccagaacaccattatggaaatggcggcggaagtcggctcggtggaagacctcgaactggaggacgtgttgcaaatcggctacggcggcgtgcgctgcgctgaatccggcggtccggagccgggcgtgggctgcgccggtcgcggcgtcatcaccgccatcaacttcctcgaagaagagggcgcgtatgaagaggacatcgacttcgtgttctacgacgtgctgggcgacgtggtgtgcggcggcttcgccatgccgatccgcgaaaacaaggcgcaggaaatctacatcgtctgctccggcgagatgatggcgatgtacgccgccaacaacatttccaaaggcatcgtgaagtacgccaagtccggcaaggtgcgcctcggcgggttgatctgcaattcccgtcagaccgatcgggaagacgagttgatcatcgcgctggcggaaaaactcggcacccagatgattcacttcgtgccgcgcgacaacatcgtgcagcgcgccgaaatccgccgtatgacggtgatcgaatacgaccctaaatgcaatcaggccgatgagtaccgcacgctggcgggcaagatcgtcaacaacaccaaaatggtggtgccgacgccggtgacgatggacgaactggagtcgctattgatggagttcggcatcatggaagaagaagacaccagcatcatcggcaagaccgccgccgaagagaatgccgcctga

SEQ ID NO: 336 - DNA, 1563 bp, artificial
  Centroid sequence
atgagccaaacgatcgataaaattcacagctgttatccgctgtttgaacaggatgaataccagaccctgttccagaataaaaagacccttgaagaggcgcacgacgcgcagcgtgtacaggaggtttttgcctggaccaccaccgccgagtatgaagcgctgaacttccagcgcgaggcgctgaccgtcgacccggccaaagcctgccagccgctcggcgccgtactctgcgcgctggggttcgccggcaccctgccctacgtgcacggctcccagggctgcgtcgcctattttcgcacctactttaaccgccattttaaagagccggtcgcctgcgtctccgactccatgaccgaggacgcggcggtgttcggcggcaacaacaacatgaatctgggcctgcagaatgccagcgcgctgtataaacccgagattatcgccgtctccaccacctgtatggccgaggtgatcggcgacgatctgcaggcgtttatcgccaacgccaaaaaagagggatttgttgacgacagcatcgccattccttacgcccatacccccagctttatcggcagccatgtcaccggctgggacaatatgttcgaagggttcgcgaagacctttaccgctgactacgccgggcagccgggcaaacagcaaaagctcaatctggtgaccggatttgagacctatctcggcaacttccgcgtgctgaagcggatgatggcgcagatggatgtcccgtgcagcctgctctccgacccatcagaggtgctcgacacccccgccgacggccattaccggatgtacgccggcggcaccagccagcaggagatcaaaaccgcgccggacgccattgacaccctgctgctgcagccgtggcagctggtgaaaagcaaaaaggtggttcaggagatgtggaaccagcccgccaccgaggtggccgttccgctgggcctggccgccaccgacgcgctgctgatgaccgtcagtcagctgaccggcaaaccgatcgccgacgctctgaccctggagcgcggccggctggtcgacatgatgctggattcccacacctggctgcatggcaaaaaattcggcctctacggcgatccggatttcgtgatggggctgacgcgcttcctgctggagctgggctgcgagccgacggtgatcctcagtcataacgccaataaacgctggcaaaaagcgatgaagaaaatgctcgatgcctcgccgtacggtcaggaaagcgaagtgttcatcaactgcgacctgtggcacttccggtcgctgatgttcacccgtcagccggactttatgatcggtaactcctacggcaagtttatccagcgcgataccctggcaaagggcaaagccttcgaagtgccgctgatccgtctgggctttccgctgttcgaccgccatcatctgcaccgccagaccacctggggctatgaaggcgcaatgaacatcgtcacgacgctggtgaacgccgtgctggaaaaactggaccacgacaccagccagttgggcaaaaccgattacagcttcgacctcgttcgttaa

SEQ ID NO: 337 - DNA, 789 bp, artificial; identical to SEQ ID NO: 65
  Centroid sequence

SEQ ID NO: 338 - DNA, 861 bp, artificial
  Centroid sequence
atgagtattcaacattttcgtgtcgcccttattcccttttttgcggcattttgccttcctgtttttgctcacccagaaacgctggtgaaagtaaaagatgctgaagatcagttgggtgcacgagtgggttacatcgaactggatctcaacagcggtaagatccttgagagttttcgccccgaagaacgttttccaatgatgagcacttttaaagttctgctatgtggtgcggtattatcccgtgttgacgccgggcaagagcaactcggtcgccgcatacactattctcagaatgacttggttgagtactcaccagtcacagaaaagcatcttacggatggcatgacagtaagagaattatgcagtgctgccataaccatgagtgataacactgctgccaacttacttctgacaacgatcggaggaccgaaggagctaaccgcttttttgcacaacatgggggatcatgtaactcgccttgatcgttgggaaccggagctgaatgaagccataccaaacgacgagcgtgacaccacgatgcctgcagcaatggcaacaacgttgcgcaaactattaactggcgaactacttactctagcttcccggcaacaattaatagactggatggaggcggataaagttgcaggaccacttctgcgctcggcccttccggctggctggtttattgctgataaatctggagccggtgagcgtgggtctcgcggtatcattgcagcactggggccagatggtaagccctcccgtatcgtagttatctacacgacggggagtcaggcaactatggatgaacgaaatagacagatcgctgagataggtgcctcactgattaagcattggtaa

SEQ ID NO: 339 - DNA, 840 bp, artificial
  Centroid sequence
atggtgacggtgttcggcattctgaatctcaccgaggactccttcttcgatgagagccggcggctagaccccgccggcgctgtcaccgcggcgatcgaaatgctgcgagtcggatcagacgtcgtggatgtcggaccggccgccagccatccggacgcgaggcctgtatcgccggccgatgagatcagacgtattgcgccgctcttagacgccctgtccgatcagatgcaccgtgtttcaatcgacagcttccaaccggaaacccagcgctatgcgctcaagcgcggcgtgggctacctgaacgatatccaaggatttcctgaccctgcgctctatcccgatattgctgaggcggactgcaggctggtggttatgcactcagcgcagcgggatggcatcgccacccgcaccggtcaccttcgacccgaagacgcgctcgacgagattgtgcggttcttcgaggcgcgggtttccgccttgcgacggagcggggtcgctgccgaccggctcatcctcgatccggggatgggatttttcttgagccccgcaccggaaacatcgctgcacgtgctgtcgaaccttcaaaagctgaagtcggcgttggggcttccgctattggtctcggtgtcgcggaaatccttcttgggcgccaccgttggccttcctgtaaaggatctgggtccagcgagccttgcggcggaacttcacgcgatcggcaatggcgctgactacgtccgcacccacgcgcctggagatctgcgaagcgcaatcaccttctcggaaaccctcgcgaaatttcgcagtcgcgacgccagagaccgagggttagatcatgcctag

SEQ ID NO: 340 - DNA, 348 bp, artificial
  Centroid sequence
atgaaaggctggctttttcttgttatcgcaatagttggcgaagtaatcgcaacatccgcattaaaatctagcgagggctttactaagcttgccccttccgccgttgtcataatcggttatggcatcgcattttattttctttctctggttctgaaatccatccctgtcggtgttgcttatgcagtctggtcgggactcggcgtcgtcataattacagccattgcctggttgcttcatgggcaaaagcttgatgcgtggggctttgtaggtatggggctcataattgctgcctttttgctcgcccgatccccatcgtggaagtcgctgcggaggccgacgccatggtga

SEQ ID NO: 341 - DNA, 306 bp, artificial
  Centroid sequence
gtgccggagtgcgctcaccgcttgatgcgctgccgcccctcactagtgagaggtagggcagcgcaagtcaatcctggcggattcactacccctgcgcgaaggccatcggtgccgcatcgaacggccggttgcggaaagtcctccctgcgtccgctgatggccggcagcagcccgtcgttgcctgatggatccaacccctccgctgctatagtgcagtcggcttctgacgttcagtgcagccgtcttctgaaaacgacacaagttgattggaatttaatctatatacatgttaaaatacttgtataa

SEQ ID NO: 342 - DNA, 1026 bp, artificial
  Centroid sequence
atggcagtacgaaaactcgacacaggaaaatggatttgcgaatgctaccccgccgggcgtagcgggcgacgggtgcgtaagcagtttgcgaccaaaggcgaggcaatggcttttgaacgccacacaatggatgaaacagaagccaagccgtggttgggtgagtcagttgatcgccggacactcaaagacgtcgtagaactttggttcaaactgcacggcaaatccctgaccgctggtgagcacgtttatgacaagctgatcctgatggttgatgccctcggaaatcctcctgcgacagacctcacatctaaaatgtttgcacactaccgcgacaaacgtctgaccggagaaatctatttcagtgagaaatggaagaatggagccagcccagtaacaatcaatctggaacaaagttatctgagtggagtgtttagcgagctggcccggctcggagaatggagcgcaccgaacccactggagaacatgcgcaaattcaccatcgccgaaaaagagatggcctggctgacacatgagcaaattacagaactcctggacgactgccatcgtcaaagtgcccttctcgctttggttgtcaaaatctgcctaagcaccggagcacgctggcgcgaagcggtaaacctcacacgctctcaggtcacaaagtaccgaatcacgtttgtcaggaccaaaggtaaaaagaaccgtagcattccgatcagcaaagagctatatgaagacatcactgccctggaggggttcaagttcttcacggactgctatttccagtttttgtcggtgatggaaaaaacctccatcgtgcttccgcgcggacagctcactcacgttctgcgtcatacgttcgcagcacactttatgatgtcaggcgggaacatccttgcccttcagaaaattctaggccaccatgatatcaaaatgacgatgcgctatgctcatttagccccagaccacctagaaacagcacttcgtttcaatcccctcgcgacaatgccaaatcaattcatgtag

SEQ ID NO: 343 - DNA, 1287 bp, artificial
  Centroid sequence
atgactaatagtatttatcgcaaggaagcgatagcttataagaagttgcactggaaagggaaagcgctattgctggctggcttgcctgcatggctagttacatgtttatctcttttatttctctgcgctcttatctgcgcccttatattctgtaaatttacacaacgcattgatgtcaaaggcgaggttatcactctccctcactccgtaaacgttttctctccgcaacaagggtttgtcgtcaatcagtatgttcaaattggagacgttgtcaaaaaaggacagacgctttatgagcttgatgtatctagaaataccacaacaggtaatgtcagtgcagcacagattgaggtaatcaatgaaaagatagccaactccgaagctattataaaaaaactaactcataataaaaacgaaacactaattgcactggatgcccagcttaaaaatgccagaaactctcttaacgaaactgtacgtatgctggccaatacgcaacaaggcttaagcaaaatgcatgaaaacctgtccagttatgataaataccttaaggaggggttaattacaaaagatcaatacaattaccaacattcgttgtactttcaacagcaaagcgcctatcagtcattgataagccaaaagatgcaactagaaactcagcttacacagttaagcagtgataaagttactaaagctgccgattttgataatcaaatatcatctcaatataatcagacaaatgattataaaaatcaactagtagaatcaaacgctaacggaaatattatcattaaggcaacaacggaaggacgcattgaatcattagccgtcactaaaggccaaatggttgataaaggcagtagtcttgcccaaatcaaacctattggtaacatcgagtattatctcatactttggctacctaacaacagcattccttatgttaaagtcggcgacacaataaatattcgttatgatgcattcccttccgataagttcggacagttccctggtgagatcatttctatctcatcacttcctgcctcacgacaggaaatgtcagaatataccaatgtcaatgatggcactaatcaacaagaacttgcattatataaggcaattgtcaaaataagggataaaaaatttaattacgatggaaaagaactttctctttcaaatggattaaaagcacaagcagtggtattccttgaagaacgcccgctttatatgtggatgtttacaccagtttataaaatttctcaaagcgtgagcggccctgtcaatgactaa

SEQ ID NO: 344 - DNA, 984 bp, artificial
  Centroid sequence
atgagcatcggcaagatgctggggattggcaatgcgggagatgccattaccggacgcgagctggaggtgatggacgacgcgcagctgagcgtagccgcgcagcagtttgatatcttcgcccgcaccagcccggaagataagttccgcctggtgcaggctctgcagagtaagaaagaaattgtcggaatgaccggcgatggggtgaacgatgccccggcgttgaagcaggctgacgtcggcgtggcgatggggatcaaggggaccgaggtgaccaaggaggccgccgatatggtgctgaccgatgataacttcgccaccatcgccagcgcagtccgcgaggggcgccgggtgtatgacaacctgaagaaaaccattctcttcgtcatgccgaccaaccttgcccaggggttactgatcgtgatcgcgctgctggcgggcaacgtactgccgctcacgccggtgttgatcctgtggatgaacatggccacctccgccacgctgtcgtttggcctggcgtttgaagccggtgagaaaaatattatgcggcggccgccgcgcgatccgaaaattcacgtgatggacggctttgccatctggcgcgtagcgtttgtggggtcaatgattgcggtcagcgcctttattctcgaagcctggttgcagccgcgcggctattcgccggagtttattcgtaccgtgctgttgcagactctggtcaccgcccagtggttctatatgctgaactgccgcgtatcggatggattctcgttaaccaaaggtctgctggccaacaaagggatctggatcgtcagcggcgtactgctggtgctacagctgctgattatctacgcgccttttatgcagatgctgttcggcaccaccgggctgccgttccgctactgggtgatcacctttatcatcggcttcgccatgttcctgatcgtggaactggaaaaaccgctgacccgcaaatggcgttccgcctga

SEQ ID NO: 345 - DNA, 2688 bp, artificial
  Centroid sequence
atgaatacagataaaccgggggcgcccttctatcagcgttccgtcgaggagacgctcgccagcgtgcaaagtacgccggagggcattagcgggacagaagcggccacacgcctgcagcagtatggcgaaaacgccctgccgcagaagccgggtaagccagcctggctgcgttttatcgtgcattttaacgatgtactaatctacgtgctgctggcggcggcgctgctgaaggcggtgatgggccattggatcgacatggcggtgatcctcgcggtggcggtcgtcaatgcgctgattggcttcatccaggaaagtaatgcggagaaatcgctgcagagtatccgcaatatgctgtccagcgaagcggtagtgatccgccagggtaaccatgaaaccatccccaccacctcgctggtacccggcgatatcgtggtgatccgcgccggcgaccgtatccccgctgatttacgggtgattgaggcgcacaacctgcgggtggaagaggccatcctcaccggggagtcaacggtggtggaaaaaaccaccgagccgctgagcggcgatttaccgctcggcgatcgcagcaacctgttgttttccggtaccaccgtcagctcaggggcgggcaaagggatcgtggtggcgaccggcggcgataccgagctgggtcacatcaaccagatgatggcgggcattgaaaaacaccgtacgccgctgctggtgcaaatggacaagctgggcaaagccatctttatcctcattctggtgatgatggcggcgctgttcgtctttagcctgctgttccgcgatatgccggtctccgaactgatgctgtcgctgattagtctcgcggtggcgtcagtcccggaaggcttgccggcgattatctcgattattctgtcgctcggtgtgcaggcgatggcgcgccagaaagcgattatccgcaagctgccgacggtggaaaccctcggcgcgatgacggttatctgttcggataaaaccgggaccctcaccatgaacgaaatgacggtgaaggcggtgatcaccgcggacagcgtctatcgggtggaaggggatagctatgagccggtcggtaagatccacgccattgatgacccgacgccggtcgcggtcgcgcctggcacgctgttcgaacgctatctgcgtaccatcgatctgtgtaacgacagtcagcttattaaagatgagagcgggttgtggaaaatcaccggtggcccgaccgagggggcgctgaaggtactggcggcgaaggttactctgccgccgctgaccagcgagctgcgcagtaaaattccttttgattcgcaatataaatacatgtcgaccctctaccggctgggtgaagaggaggtggtgctggtcactggcgcgccggatgtcctgttccgcttgtgtcaatatcaacagagcgacagcggattgcagccgctggatctaccgtactgggaaggcaaaattgaagagtacgcccgggaagggctacggatggtggccgcggcctggaagccggcttccgcaggccagacggaactaacccatcaggatctgcagcagggggtgattttgttaggggttgccgggatgatggatccgccgcgtccggaggccatcacggcgattgccgactgcctgcaggccgggatccgcgtgaagatgatcaccggcgaccacccgcaaacggcgatgagtatcggcaagatgctggggattggcaatgcggggaatgccattaccgggcgcgaactggaggtgatggacgacgcgcagctgagcgtggccgcgcagcagtatgatatctttgcccgaaccagcccggaagataagttccgcctggtgcaggccctgcagagcaagaaagagattgtcgggatgaccggcgacggggtgaacgatgctccggcgctgaagcaggctgacgtcggcgtggcgatggggatcaaggggaccgaggtgaccaaggaagccgccgatatggtgctgaccgatgataacttcgccaccatcgccagcgcggtccgcgaggggcgtcgggtgtatgacaacctgaagaaaaccattctcttcgtcatgccgaccaaccttgcgcaggggttactgatcgtgatcgcgctgctggcgggcaacgtactgccgctgacgccggtgctgatcctgtggatgaacatggccacttccgccacgctgtcgtttggtctggcgtttgaagccggtgagaaaaatattatgcggcggccgccgcgtgatccgaaaattcacgtcatggacggctttgccatctggcgcgtggcgtttgtggggtcgatgattgcggtcagcgcatttattctcgaagcctggctgcagccgcgcggctattcgccggagtttatccgtaccgtgctgttgcagaccctggtcaccgcccaatggttctatatgctgaactgccgcgtgtcggatggtttctcgttgacgaaaagtctgctggctaacaaagggatctggattgtcagcggcgtgctgctggtgctgcagctgctgattatctatgcgccgtttatgcagatgctgttcggtaccaccgggctgccgttccgctactgggtgatcaccttcatcatcggcttcgcgatgttcctgatcgttgaactggaaaaaccgctgacccgcaaatggcgaaccgcctga

SEQ ID NO: 346 - DNA, 2688 bp, artificial
  Centroid sequence
atgaatacagaaaaaccgggcggcccgttttatcagctctccgtagaagaaacgctgaccagcaccaacagcaccccggaaggcatcagcggagccgaggcatcggcgcgcttgcagcaatatggtgaaaatgcgttgccgcaaaaggccgggaagccagcgtggctgcgttttctggcgcattttaatgatgtgctgatttacgtcctgctggcggcggcgctgctgacggcgataatgggccactgggtagataccctggtgattctgggcgtggcggtgattaacgcgctgatcggccatatccaggagagcaacgcggaaaaatcgcttcagagcattcgcaacatgctctccagtgaggcggtggtgattcgtcagggtaaccatgaaaccattccgaccaccgctctggttcccggcgatatcgtggtgatccgcgcgggcgatcggatacctgccgacctgcgggttatcgaagcgcataatctgcgggtggaagaagcgattctgacaggggaatcgacggtggtggagaaaagcaccgaggcgcttagcggcgaactgccgcttggcgatcggacaaatctgctgttttccggcaccacggtgagttcgggcggcggaaaaggtctggtggtggcgaccggcggcgataccgagctgggccacattaaccagatgatgtcggatatagaaaaacaccgtactccgttgctggtgcagatggataagctcggtaaagccatttttattatcattctggtgatgatggccgcgctgtttgccttcagcctgctgttccgcgatatgccggtttctgagctgatgctgtcgttgattagcctcgcggtggcatcggtgcctgaagggctaccggcgattatctcaattatcctctctcttggcgtacaaaccatggcccggcagaaggcgattatccgcaaactgccgaccgtggaaaccctcggtgcgatgacggtgatctgctcggataaaaccgggacgctaaccatgaacgagatgacggtcaaagccgttatcaccgccgataaggtttatcgggtggaaggcgacagctacgagccggtagggaatattcatcggatcgatgaacctgctccgataaccgttgctccaggcacgttgctggaacgctatctgcgcaccatcgatctgtgtaatgacagccagcttatcaaagatgaaggcgggctgtggaaaattaccggcggcccgaccgaaggggcgctgaaggttctggcggcgaaagtcgcgctcccggtggtcaacaccgagctacgcagtaaaataccttttgattcacagtataaatatatgtcgacgctgtatcgcatcggcgatgaagagatgattttgattaccggcgcgcccgatgtcctgtttcgcttgtgtcagcatcagcagaccgaccatggtctggaaccgctcgaccagccttactgggaagcgaaaatcgaagagtacgcgcgggaagggctgcggatggtggcggcagcgtggaaaccggcaaccgacggacaaacggagcttggccatcaggatttacatcaaggcgtcattctgctggggatcgccgggatgatggatccgccaagaccggaggcgattacggcgataggcgactgcctgcaggcagggatccgtgtgaagatgattaccggcgaccacccgcaaactgccatgagtatcggcaagatgctggggatcggcaatgcggaaaacgcgattaccggacgcgagctggaggtgatggacgatattcagcttagtgaagcggcgcagaaattcgatattttcgcgcgtaccagcccggaagataaattccgcctggtccaggcgctgcaaagcaggaaagaggtggtcgggatgaccggcgatggcgtgaacgatgccccggcgctgaagcaggccgatgttgggatcgccatggggattaagggcactgaagtgactaaggaggccgctgatatggtgctcaccgatgataacttcgccaccatcgccagcgcagtcagagaggggcgtcgggtatacgataacctgaagaaaaccattctgtttatcatgccgaccaacctggcgcagggattgttaattattatcgcgctgctggcggggaatttaataccgctgacgccagtgctgatcctgtggatgaacatggcgacctcagcaacgctgtcgtttggcctggcgtttgaagccggtgagaagaacatcatgcgccgtccgccgcgcgatcctaagctgcacgtaatggacggctttgctatctggcgggtgatttttgtcggttcgatgattgccgttagcgcctttgtgcttgaggcctggctgcagccgcgcggctattcgcctgagtttattcgaacggtgctgttgcagacgctggtcaccgcccagtggttctatatgcttaactgccgggttgctgatggcttctcattgagtaaagggctgttggagaaccgcgggatctggattgtcagcggagtgctgctggtactgcagctgctgattatctacgctccgtttatgcagatgctgtttggtaccgaagcgctgccattccgctactgggtgatcacctttattatcggttttgtcatgttcctgattgtagaagtcgagaagccgctgacccggagatggcgttctgtctga

SEQ ID NO: 347 - DNA, 861 bp, artificial
  Centroid sequence
atgaatacagataaaccgggggcgccctattatcagcgctccgtcgaggagactctcgccagcgtgcagagttcgccggaagggattagcggaacagaggcggctacgcgcctgcagcagtatggcgaaaacgccctgccgcagaagccgggtaaacccgcctggctgcgttttattgcgcattttaacgatgtgctgatctacgtcctgctggcggcagcgttgctcaaggcggtgatgggccattggatcgacatggcggtgatcctcgccgtggaggtggtcaatgcgctgatcggcttcattcaggagagtaatgcggaaaaatcgctgcagagtatccgcaatatgctgtccagcgaggcggtggcgatccgtcagggcaaccatgaaaccatccccaccacctcgctggtacctgtcgatatcgtggtgatccgcgccggcgaccgtatccccgccgatctacgggtgattgaggcgcacaacctgcgggtggaagaggcgatcctcaccggcgagtcgacggtggtggaaaaaaccaccgagccgctaagcggcgatttaccgctcggcgatcgcagcaacctgttgttttccgggaccaccgttagctcaggggcgggaaaagggatcgtggtggccaccggcggcgataccgagctgggccatatcaaccaaatgatggtgggcattgagaaacaccgcacgccgctgctggtgcaaatggacaagctgggcaaagccatctttatccttattctggtgatgatggcggcgctgttcgtctttagcctgctgttccgcgatatgccggtctccgaactgatgctgtcgttgattagcctcgcggtggcatag

SEQ ID NO: 348 - DNA, 249 bp, artificial
  Centroid sequence
ttgtctcaccccgctatttttgagacagtatacctgacaggcgcacaccatgcccggaaggaaagaatcatgacaaaacaggaaaaaacagccctcaatatggctaaatttattaaggagcagtcgctgctattgctcgataaactgaatgagctggatatggataccccggccgacatgtgcgagcggctacacgaggatgcggaaacactctggcaggtgatgcgggataagctcggggaggaataa

SEQ ID NO: 349 - DNA, 300 bp, artificial
  Centroid sequence
atgccgtatgacgtggaatggaagcagggagccatcgaggatgtaacgacgctgtttgactatatcgcggaaaattcatccctgtgggatgcgcagaacgttaccgaccgggttctcgctgcggcggacaaactggccgacttcccgcgactctatgaagtggactcacgctatggcgaggacgttcgccggatcagtctgatgggacagcatgtcctctatgatgttgatgaccagaccagaaaagtccgggttctggccgtggtcggccagcgccagaatccccatattgttctctaa

SEQ ID NO: 350 - DNA, 753 bp, artificial
  Centroid sequence
atgaaaggctgctccggcaacggacaactaattggacgcgctaagacgctggaactggcttacggctgtgccgacaaggttccgggggaaggcgactggaaactgatggggttgccaacatcggcaacgtgggaccttagcccggaggccctgacctctgatgctgataacggcggattgagttcaaacctgattgccagtctggacccgacctactccatcgaaggggaggttcgcgttaaagaccgcactgatgagtttggcattcagcagttcgtgaaatacatcgtcgatgaggttcgtgcccgccgccagccaggtgtatggatgcgtttccactggggcgattattaccatatgggctatatggtcccatcaggagccagtgacggcggtggtgtgaaagaaatcgtgacctacagctttgagttcaaactggctgacggcaacacgttccagatcaccgaagcggacgaaggcattccggtaactggcgtgacggttgcgccaacgaccagctctatcgccgccggaaaaagcaccaccttcaaagtaacgattgaacccgcagctgctgacgacaaggccttcacggttacttcatctgatccagcgtgcgcgacagtagcatttgttggcaatacggtaaccgtgtcagcgccgtcaggtgcaaaggcgggaacagcaacaattactgtgaagacggttgatggtaaccacgtggctacccacgaggttactgtcgaggcgtaa

SEQ ID NO: 351 - DNA, 2574 bp, artificial
  Centroid sequence
atgagtgataaaaacctgcgcctgcaggtggttctgaatgcggttgataaactcacccgccctttaaaaaatgcgctggctggctcgaaggagttggcctccggcatccggcagacccgtgatcagcttaaacggcttaacgacgcggggagccagttaaaatcttttgatcaactctcacagagcctgaaccggaccagcaacgagctggaccaggcgcggctgcgtgcgcagatgatgacgcgcgaactggcagcgctcgaatcccccacgaaaaaacagacgcaggcgcttgaggcgcaatggcgcgccgtatcacgcctggaacaaaagcaggggcaggaaacgcggcagatggctgcagccagggcggagctgtaccgccttggcatctctgcgggcggtggcgcccgtgaaacggccagaattacccgcgaaacggatcgctataaccagctgctggcagagcaggagcggcgcttgcgggacgtgggcgagcgccagcgcaagctgaatgcgatcagggccaaagctgacaagatgcgcgacgtgcgtaacagcctggcggggaacggggccgggatgatggcggccggggtgacaacgggcgcgaccttgctggcgcccattcgcgcctactcggaatcagagaacgccgctaaccagctggcaggctcaatgatgggaccgggcggaaaggtggcgcctgagttcctgaagctgaataagctggcgattgccctgggggaccggttgcccggtaccacggcagattttcagaacatgatgaccatgttacgccgtcaggggatgtcagcgcaggttatcctgggcgggctgggtgagtcggcggcttaccttggcgtgcagctgcaaatggcgccgacggaggcggcagagtttgccgcaaaattgcaggacgccacgcagaccaccgaaaaagacatgatgagcctgatggatcttatccagcgtggtttttatgcgggcgtagaccccgggaatatgctgcagggtttttcaaaaattagtagcgcgatgagtatcctaaataaaaaagggatagatgcagctaaaacctttgccccactgctggttatggccgaccaggcaagtatggccggggagtctgctgggaatgcgtatcggaaaatattccaggctgccctggatgcaaagaaaattaaagctgttaatgatgatctaaaagggaccggcattaagtttaatttttctgatggtaagggaggatttggtgggctggaaaatatgtatgtccagctaagtaagctgagcaaacttactcccgagaagcagatggcaacaaaaaaagacctgtttggcaatgattcagaaacgctgcaggcgttggatatcatgatccaaaaaggtattgatggttatcgtgaaacagtagcgaagctggagaaccaggcaaccctgcgcgagcgcgtcgatgcatcgcttaataccctaggcaacaaatgggaagccgctggcggctcctttaccaacgccatggcgagcatcggtgaaaccgtcgcgccggtgctgaaaaatattgcggactggctgggtaatctggcgtccgcgctggatggttttgtgaagcgtcatccgcaactgacggcggcgctatttaaaattgcggccgtatttgccgtggtagctaccgcagcgggtgtggtgtcactggcccttgcatccattttgggacctatggcgatagtgcgggtaagtgctggaattctccagcttaaatttgcttctgcgtttggtctggtcacaagagtaattggcggcgcaggccaggcggtcatctggttaggccggttgatgatggctaaccccattctggcgatagttggcctgattgcgatgggagccatctatatctggcagaactgggaaacgctggggccgaagtttaaagcactgtgggatgccatcacgtcaggggtatcagtagcctgggctgtgattaagcagaccataagcagcaaatgggatgaaattctgagtgatgttgccgcgctgcccgcaaaatttaaagcggtgggcggggcgatcattgacggcatcctgagcggtatcaatgagaaatgggaaacgcttaagagcaagctggcatcggtcaaaagctacctgccggactggatgaccggcggcgataattcgcagggcgcctcaccgcagaaaaagaccccaggatttttcgcggggatgtatgacagcggtggctatattccacgtggacaggtgggtattgctggcgagaatggcccggagctgattaacggtccggcctatgtgaccagccgcaggagaacggccgcgctggcgtccgtagtcgccggaatgatggggggagcaatgccagcagaggccgccccgcttcatcccatgagtctgccggcagcttcataccgtcctgtaactgataagccagcagccagcctgtattccagtttgaaacccatgcgcaaattattatccaggctctgcccggtcagagcacgcaggatattgcgcaggaagttgcacggcagcttgatgcgcgcgagcgacgcatga

SEQ ID NO: 352 - DNA, 1431 bp, artificial
  Centroid sequence
atgacctctgatttcatgacacctccgcacagtattgaagcagagcagagcgtacttggcggactcctgctggacgacgacaacagcgagcgtactcagaaggtactttcgattctcaagccagaatcgttctacgcgcgtcagcaccaggtcatttttgctgaaatgcgccagatgtaccgcgaccataagcctgtcgatctgctgaccctgtttgatgctctcgatagcaaggggctgacggaaaccgttggtggctttgcatacctggctgaaatgtcgaagaacacgccaagcgcggcgaacatcgtggcatatgcgatgcgtgttcgtgagaccgctatggagcgctacggcatcgagaaaacaacgaaggcgatcgagttgctttatgcccgcaacggcatgacggcagaacagaagtttgacgcaattcagggattattcactgagataaccgagcacgtaaaaacagggcgacggactgggcttcgcacgttctatgacgctgttactgactggtcagcagaattcgacgaaaggctcaagccggatggtcgttcccgcggattgtcgaccgggatccgctctctggatgagcttctcggtgtgaagcgcattgtgcgcggcagcctgtttgttatcggcgcacgtccgaagatgggtaaaaccacgctatacacccagatgggtgttaactgcgcgacggtcgagaacgagccagcccttatgttttctctggaaatgccggaggggcaaatggtggagaaaatcactgcgcagaaggggaggatctcgccaaacctgttttacccggacatgacgaaggacgactacgggtatcacggcgactggaacagcgatctgaaaaaagccaccggcgtgatgggggcgctgattgacaccaataacctcctgattgatgacaccccgggtatttcactggcgcatgtcatggctgagtcacgtcgcatcaagcgcgaacgcggcaaggttgggatgatcctcgttgactacctgacgctgatgactgccgataaggcagagcgaaatgacctggcttacgggctgatcaccaaaggcctcaagaccctggcgaaggagctggattgcgtcgtggttctcctgactcagcttaaccgtgagcttgagaagcgaaccaataagcgccccttgccgagcgactcccgcgacaccgggcagattgaacaggactgcgattactggctggccatataccgggagggcgcctacgacgagaatgcaaaccagagtgacacagagctcctcctgcgccttaaccggcatggtgagacaggtgttgtctattgcgagcagcgtcacggggcgatttatgactgcgatcaggaagctgccagtcagcgccggcgcgagaaagaggaaaaaccaaccaagcggggtggattctga

SEQ ID NO: 353 - DNA, 1014 bp, artificial
  Centroid sequence
atgaaaaccgccactgcgccgttaccaccgctgcgttcggtcaaggttctggaccagttgcgtgagcgcatacgctacttgcattacagcttacgaaccgaacaggcttatgtccactgggttcgtgccttcatccgtttccacggtgtgcgtcacccggcaaccttgggcagcagcgaagtcgaggcatttctgtcctggctggcgaacgagcgcaaggtttcggtctccacgcatcgtcaggcattggcggccttgctgttcttctacggcaaggtgctgtgcacggatctgccctggcttcaggagatcggaagacctcggccgtcgcggcgcttgccggtggtgctgaccccggatgaagtggttcgcatcctcggttttctggaaggcgagcatcgtttgttcgcccagcttctgtatggaacgggcatgcggatcagtgagggtttgcaactgcgggtcaaggatctggatttcgatcacggcacgatcatcgtgcgggagggcaagggctccaaggatcgggccttgatgttacccgagagcttggcacccagcctgcgcgagcagctgtcgcgtgcacgggcatggtggctgaaggaccaggccgagggccgcagcggcgttgcgcttcccgacgcccttgagcggaagtatccgcgcgccgggcattcctggccgtggttctgggtttttgcgcagcacacgcattcgaccgatccacggagcggtgtcgtgcgtcgccatcacatgtatgaccagacctttcagcgcgccttcaaacgtgccgtagaacaagcaggcatcacgaagcccgccacaccgcacaccctccgccactcgttcgcgacggccttgctccgcagcggttacgacattcgaaccgtgcaggatctgctcggccattccgacgtctctacgacgatgatttacacgcatgtgctgaaagttggcggtgccggagtgcgctcaccgcttgatgcgctgccgcccctcactagtgagaggtag

SEQ ID NO: 354 - DNA, 756 bp, artificial
  Centroid sequence
atgtctaatatcatcccaatgaattacgatgaccgttcattcccttttacggctgattgctggttcaatgctacggttgccgcgaaacattacggcaagcttccaaaggactggctaaagaccgaggcgacaaaaatttatatcgccgaactggctgaggagcttggaattgctggctccggcgtaaaagaggatttttctccccttttagtcagagtggagaaagggagaaacggcgggacctggcttcatccggagttagcggtggaattcgcccgctggttgtctgtcaaattcgcccgcgcctgtgaccgacacattaaaaatctgctgctgagtaaaaacttccagctcaccgaagatcagattgttggcctgatggtctgccagcaaccaacatcgtgggaaaaacgatttaaagacccgttctatcaggcgctgtcgaaaatgtccggccttccttactttggtcatgtcggcggttgcccggcgctgttcggtcagatcaccgctcgctgggtgtacggtgtcgcgcttcctgattatgtctatcaggcagcaaaacaagcagcgggcgacagcagagagaagattcaccagcacctcaagcctgatgcgctggagaaggtcgagcagcaactgatcgccgttaccaacgttgccagttgcagcattgaccagcaggacttcgaagcccgttgcatggctgcgtttcccgttaagggtcagatgaaactgctgtatgcggcggcgtga

SEQ ID NO: 355 - DNA, 1011 bp, artificial
  Centroid sequence
atgctgccgaaactcgttataactcaccgagtacacgatgagatcctgcaactgctggcgccacattgcgagctggtgaccaaccagaccgacagcacgctgacgcgcgaggaaattctgcgccgctgtcgcgatgctcaggcgatgatggcgttcatgcccgatcgggtcgatgcagactttcttcaagcctgccctgagctgcgtgtagtcggctgcgcgctcaagggcttcgacaatttcgatgtggacgcctgtactgcccgcggggtctggctgaccttcgtgcctgatctgttgacggtcccgactgccgagctggcgatcggactggcggtggggctggggcggcatctgcgggcagcagatgcgttcgtccgctctggcgagttccagggctggcaaccacagttctacggcacggggctggataacgctacggtcggcatccttggcatgggcgccatcggactggccatggctgagcgcttgcagggatggggcgcgaccctgcagtaccacgaggcgaaggctctggatacacaaaccgagcaacggctcggcctgcgccaggtggcgtgcagcgaactcttcgccagctcggacttcatcctgctggcgcttcccttgaatgccgatacccagcatctggtcaacgccgagctgcttgccctcgtacggccgggcgctctgcttgtaaacccctgtcgtggttcggtagtggatgaagccgccgtgctcgcggcgcttgagcgaggccagctcggcgggtatgcggcggatgtattcgaaatggaagactgggctcgcgcggaccggccgcggctgatcgatcctgcgctgctcgcgcatccgaatacgctgttcactccgcacatagggtcggcagtgcgcgcggtgcgcctggagattgaacgttgtgcagcgcagaacatcatccaggtattggcaggtgcgcgcccaatcaacgctgcgaaccgtctgcccaaggccgagcctgccgcatgttga

SEQ ID NO: 356 - DNA, 870 bp, artificial
  Centroid sequence
atgttgaatccggtctggctgaagagcctggtagcgatcgttcaaacaggcagttttcagagcgcggcgagggcgttggggctggcccagccgacggtgtcgcagcacttgcagaagcttgaagagcaggtcggcgtaacgctggtgcagcgcagtcgtagcggctgccagcctaccacacgggcgctggccttcatgccgcatgcgaccgccttgctcgacatgcacgcccgggcgctagaagccctgcatggcaatcgtgagcgcgtcggggccagcaccaacatcggcacctaccttctccagccattcgtgcgcaactatctgacgaccgcaaatgagaggggcgaggtggatctgcgcatcgccgccaacccggatgtggccgaccagctactggcgggccagctcgacgccgcgatcatggaatggtggctacctcaccccgacttcgaacaccgcctctggcgggtcgagccgctggtgcttatcgtcagccccgaccatgcgctggctgaagcagggtgcatagaacgtgatcgtctggtggacctgccgatgctgggaggtgaaccgggtagcggtaccggacggcttctgaccgaatactttggcgaactgggcgtgcctcgcagcggtatgcagctaggcagcaccgaggcagtcaaacaagcagtgagggcgggactcggcgtgtcgttggtgatggcttccgcagtacaagacgaagttcgcagtggcgcgctggtagctcttcccatcccggggcttgaaaagcgtctccaactgatctggcgcaaacctcccggaaatctgcacccgccgggatttgtgcggcacttattggaggaggcagatctagctggataa

SEQ ID NO: 357 - DNA, 300 bp, artificial
  Centroid sequence
atgagtgagaaaaaagaagcaacggtgaagctggatagcccgatcacgcgcggtgataccacgattacggaaattgtgctgcgtaagccgcaatccggcgcgctgcgcggtacgcgactgcaggcggtgatggagatggacgtggcctctatgatgaccgtgatcccccgcatctccacaccaacgctgaccccgcaggaaatggcggaccttgaccctgctgaccttgccgcaatgtcgatcgaggtggtcctttttttgttgccgaagtcggcgtttgccgatttgccgacagcctga

SEQ ID NO: 358 - DNA, 864 bp, artificial
  Centroid sequence
atgaaacgcttatccgcgctcttattgacttgcttgctgtccgctgtttcaagtttgtccgccctagcggccgatgccgatccggatgtgctaaaggttgccctgctgccggacgaaaacgcctccgagctgatcaagcgtaaccagccgctgaaggattatctggaagagcatctggacaagaaggtgcagctgatcgtaaccaccgactattcctcgatgattgaggcgatgcgctttggccgtatcgacctggcgtatttcggtccgctgtcctacgtcatggccaaaagcaaaagcgacatcgagcccttcgctgtcacggtcatcgacggcaagccgacctatcgctcggtgattatcgccaatgtggcgtcaggcgtgaatgagtatgccgaccttaagggcaagaagatggcctatggtgaccgggcatcgacgtccagccatttgattcccaaaaccgtgcttcttgagacggccggtttgacgggtgggcgggactacgaagaatattttgtgggcacgcatgacgccgttgccgtcaacgtggcgaacggcaacgccgatgcgggtgggctgtcggaggtaattttcaatcacgtagtcgaacgtggcctaatcgatccgagcaaggtgaaagtacttggttacagcggcgaatacccccagtacccctgggcgatgcgctcgaacctgagccccgagctgaaaaccaaggtgcgggatgtattcgtcggtatcgacgatcccgaagtgctgcgcaacttcaaggccgaggccttcgcgccaatcaccgacgccgactacgatgtgatccgcaaaatgggatcgctgctcggcctcgacttcgccacgatgtga

SEQ ID NO: 359 - DNA, 828 bp, artificial
  Centroid sequence
atgatgccccatccaatacaggacgccgtgctgcgggtcgaccggttgagcgtcgtctatccaggcggcgtgacagccctacgcgatacctcgattgcatttcggcgtggtgagttcaccgtgctgcttggtctctcgggcgcaggcaagtcgaccttgctccgtagtctcaatcgactcgtcacgcccactggcggcagtgtcaccagcgaactcggtgagctcggcagcggctcggccttgcgtcagcatcgtcggcgtaccgccatgatctttcagcaccaccagctaatcgaacgtcaaagcgcactggctaatgtgcttaccggtcggctggcctttcacaacacgctccgctcgctgtttcctctgccgcgtgccgatcaggagattgcgctcagttgcctcgctcgggtcggtctggcagacaaggcgctaagccgggtggacaaactgtccggtggccagcagcagcgggtaggcatcgcgcgtgcgctagcgcaacagccggcgatcattctggccgatgagccggtagccagtctcgacccggccacttcggtccgtgttctcggattgctgcgcgacatctgcaaggaagacggcatcaccgccatcgtttcgctgcatcaactcgaatatgcccgccgcttcgccgatcgcgtcgtcgggctggccgattctcagatcgttttcgatgccgcgccctcggaactcaccgatgcgcagcttgagcgcatctatgcaggccgctctacgactcagccagcgaatactccggctgaaccacctgtcatgctcgaaccttcactggagatgtcccgatga

SEQ ID NO: 360 - DNA, 840 bp, artificial
  Centroid sequence
gtgagcaccgatatgtctactcattacgacgtgcaggcgctgcctgcagagcaacgcgagcacatccttcgaggcttcggcctcggttggtggcgccagctggggcaggtggcgattgtattcggagtggtgctgttggcctgctggtacgtggggctgctcgatgccaccacgctgctgaacgggctgccctccatcgcgaccctggcaggcgaggccatgccgccagacttttcgggctatcgaagctggattcgccccttgatcgacaccttggcgatgagcatcgccggtacggccatcgcagtggtgttctcgctggtggtggccttcgttgcagcgcgcaatacggcgccgcacccccttgtgttcggtgttgcccgggtgctgctcaatgccctgcggtcggtgccggagctgatcatgggcatcatcttcgttgcagccgtagggttcggcgccttgccgggcgtgcttgccctgggtctgcattcggtcggcatggtcagcaagttcttcgccgaggccatcgagcacgtcgacgaagcgccggtggaagccgctcgggcggcgggggctacgccgatgcaagtgctgctgcacgcggttttgccacaggtgacgccgcagttcgccgacgtggcgatctaccgctgggaatacaactttcgcgcctccaccgtgatgggcatggttggcgccggcggtatcggcttcgaactcatgggctcgctgcgcatcatgcagtaccaggaggttgcagcaatcctgctggtcatcctggccatggtcacgctagtagacgccttcagtggcgtgctgcgcaaacgtttcaaatag

SEQ ID NO: 361 - DNA, 573 bp, artificial
  Centroid sequence
atgaatacgcaattaaccgaaatcatgcgccttatcaccaatctgatccgcaccggcattgtgaccgaagtggaccgggacggctggctgtgccgggtgaaaacgggcgacctcgaaaccaactggattaactggctgacctaccgtgcaggtaaatcacgcacctggtggtgcccgtctccaggggagcaggtggtgctgttcagcctgggcggcaatctggaaacagcctttgcgcttccggccatctactccaacgcctgcctgccgccgtcagactctgaaagtgcggacgtgactgcatacgaggatggcggctggttcgaatacgaccccgccaccgggcgctggattattcgcggcgtgaaaagcgtgctgattgagtcttcgcaggttgtctcctgcaaaaccggtgagtttatgatcgaggctgacaccacccgtattaacagcaacgtgatcctgaacggcgatgtgacccacggaggcggcgcgatgacgtcaaacggcgtcgttgctgataagcataaacaccctggcgacagtggcggaacgacgggagatccattttga

SEQ ID NO: 362 - DNA, 360 bp, artificial
  Centroid sequence
ttgacgctctatatcgggatgagccgcgataccggcagagccataacggaaactgaccacctgcgccagtcggtgcgtgacattttgctgaccccgcaagggagccggcttgcgcgccgggagtatggttccctgctttcagcgctcattgaccagccgcaaaacccggcgctgcgcctgcagatcatggctgcggtgtatgtggcgttgcggcgctgggagccgcggctgcagctggacactatcacggttaacagcagcatggatggcgcaatggttattgagctggcaggccagcgtaatgacggcgtgcccgtgtccctttccgtatcgacaggagcagacaatggccgttattga

SEQ ID NO: 363 - DNA, 432 bp, artificial
  Centroid sequence
gtgaacaagcctcaatccttacgccgcgccctgaatagcgcggtgccatatgtccgcgataacccggataagctgcatttgttcgttgataacggatcggtggtggcaaccggggcagcgtcactttcatgggaatatcgttacaccctgaatgtggtgattgtggatttcagcggcgatcaggggttattgatggcgccggtggtggcctggttaagggaaaatcagccggatgctattcataacccggaactgcgggaaaagttgctttcctttgaagtcgacattttgcgtaatgatatctgtgatattagcctgaatctgcaactgacagagcgtgtgatagtcagcgctgacggtgacgtgtccagcgtcgaagcggtgccggaaccgggcgaaccggacgaaatgtgggcggtgagccgtggctga

SEQ ID NO: 364 - DNA, 1719 bp, artificial
  Centroid sequence
atgctgctgtactttcagggataccgcgtagcccgcattgctgaaatgctgggcgagaaagttgcaaccgttcacagctggaagaagcgcgacaaatggggcgactatgggccgctggatcagatgcagctcaccaccgccgcacgttactgccagctcattatgaaggagcagaaagaagggaaagacttcaaggaaattgacctgctggcgcgtcagtcagagcgccacgcccggatcggtaaatttaacgatggcgggaacgaagcagacttaaacccgaaagttgccaaccgtaacaaagggccacgccgccagcccgaaaagaatgttttcactgatgaacagaccgaaaaactggaagaaatcttccgcaacggcatgtttgaatatcagcgccactggtggcaggcgggcgtaaaacaccgcattcgcaacctgcttaaatcacgccagatcggggcaacatacttttttgcccgtgaggcgctgattgacgccatcaccacggggcgcaaccagatttttctctcagccagtaaggcgcaggcacacgtttttaagcagtacatcatcgactttgcaaaagaggtggatgttgagctgaaaggcgacccgatgacgctcagcaacggcgcgtgcctgtacttcctcggcaccaacgcccgcacggcgcagagctaccacggcaacctgtaccttgatgaatatttctggataccgaaattccaggagctgcgcaaggttgcctccggcatggccattcacaagaaatggcgacaaacctacttctccacgccgtccagcctgacccacagtgcctatccgttctggtccggcgcgctgttcaacaggggccgtgccaaagcggacaaggtggatattgacctgacccacggcaaccttgcgcgcggcgtgctctgcccggacggacagtatcgccagatcgtcaccgtggaggatgcggtgcgcggcggctgtaatctgttcgacctggaccagctgcgcatggagtacagcccggacgaataccagaacctgctgatgtgcgaatttattgacgatctggcgtcagtgttcccgctcagcgagctgcaggcgtgcatggtggacagctgggaagtgtgggcagattttcaggcgctggcgctccgcccgtttggctggcgcgaagtctggatcggatacgacccggcgaaaggcacgcagaacggtgacagtgccgggtgcgtggtggtggcaccgccagccgtaccgggcggcaagttccgcattcttgagcggcaccagtggcgcgggatggacttccgcgcccaggctgacgccatcaaaaagctgacgcagcagtacaacgtgacctatatcggcatcgattcgaccggtgtcggtcacggtgtctacgagaacgtgaaagcgttctttcctgcggtgcgggagtttgtctacaaccccaacgtcaaaaacgccctggtgctcaaggcatacgacattatcagccaccggcgtctggagttcgacgccgggcataccgacattgcgcagtcctttatggctatccgccgggccacaaccgccagcggcaaccgcccaacctatgaagccagccgcagcgaagaagccagccacgcagatttggcctgggcaacgatgcacgcactgtttaacgaaccgctgcagggcgaagccgccaataccagcaatattgtggagattttctga

SEQ ID NO: 365 - DNA, 1173 bp, artificial
  Centroid sequence
atggcgcaagactaccaccacggcgtgcgcgttgtagaagttaacgacggcacccgctctatcacgacggtgagcacggcgatcgtgggcatggtgtgcaccggcgatgatgccgatgcctccatgttcccgctcaatacgccggtactccttaccgacgcgctgaccgccagcggtaaagcgggcgagtccggcacgctggcccgctcactggacgctatcgcagaacaggcaaaacccgtcaccgtagtggtgcgtgttgcccagggcgaaaccgaagcggaaaccaccgctaacatcatcggcggcgtgaccgctgagggtaagaaaaccggcatgaaggcgttactttcggcgcagtcgcagctgggtgtgaaaccgcgcattctcggcgtaccggggcatgatacgcaggccgtatccactgagctgctgagcgtggcgcagagcctgcgggcctttgcgtatatgtcagcttacggctgtaagacggtggaggatgcgatcgcctaccgcgacaacttcagccagcgtgaagggatgcttatctggcctgacttcatcaactttgacacggtgctgcaggcggatgcgaccgcctacgccaccgcccgcgccctgggattgcgcgccaaaatcgacgagcagaccggctggcacaaaaccctgtctaacgtgggcgtcaacggcgtaacaggcttctctgcggatgtgttctgggacctgcagaacccggcaaccgatgccgggctgctgaaccaaaacgacgtcaccacgttgatccgcaaggatggtttccgcttctggggttcccgctgcctcagtgatgatccgctgttccagtttgaaaactacacccgcaccgcgcaggtgctggctgacaccatggcggagggccatatgtgggcggtggacatgccgcttaacccgtcgctggcccgcgacattatcgaaggcatccgcgccaaaatgcgcagcctggtgaatcagggctacctcatcggcggtgattgctggattgatgacagcgttaacgacaaagacaccctgaaggccgggaagctctggatcgattacgactacacgccagtgccgccactggaaaacctgatgctgcgccagcgcatcactgaccgttacctggtggatttcaccacccgcgtaagcgcataa

SEQ ID NO: 366 - DNA, 120 bp, artificial
  Centroid sequence
gtgacgaagctaaaacagggcattgacccaaaagtcgaacagaaagaagctcaggccgagaattctggtgcatatactttcgaaaccattgctcgtgaatggcatgccagtaacaagtga

SEQ ID NO: 367 - DNA, 204 bp, artificial
  Centroid sequence
atgaaagtgcgtgcgcatcagtatgacacggtggacgcgctttgctggcgtcattacgggcgcacgcagggtgtcacggagcaggtactgaaggcaaatccggggcttgccgaatacggcccctttttacctcacgggctgcaggtggagctgccggacattccgaccaccaccaccgtgcagaccgtccagctatgggactga

SEQ ID NO: 368 - DNA, 246 bp, artificial
  Centroid sequence
atgatgatggtcctgggcttgtttgtgtttcagctgcgcacggttccctatcagcaactgcagtatcagcggaactggcgccatgtgaccaacaaccgcgttaatcgccgtccgacaacgcaatttttggggccagataacgatcagctgacgctctccggcgtcctcatgccggaagtgaccggcggccggttgtcgttgctggcgctggagctgatggcagagcaggggaaggcgtggccgtga

SEQ ID NO: 369 - DNA, 516 bp, artificial
  Centroid sequence
atggccttaccacgcaagttaaaacacctgaatatttttaacgccggtaacaactggatgggcattgctgaatccgtcaccctgccgaaattcacccgcaagctggaaaactaccgcggcggcggtatgcccggttcagtcggtattgatctggggctggatgatggcgcgctggatacggaaatgaccatcggtggcactgaggcgcttctgtttaaacagatgggcaaagccacggtggacggcgtgcagctgcgctttaccgggtctattcagcgcgacgacaccggcgaagttcaggccgttgagctggtcgtccgtgggcgccacaaagaggtggattccggcgagtggaaaaccggcgagagcaactccaccaaagtcagcagcgttaactgttacgcgaagttgaccattaacggtgaagtgctctatgaggtcgatgcgatcaacatgattgaagttgttgatggtgttgacctgatggaagaacaccgtaacgccatcggtctgtaa

SEQ ID NO: 370 - DNA, 216 bp, artificial
  Centroid sequence
atgacgcttgaacggatcagcgccttcatcacgtactgcatcgctgtactgctggcatggatgggagatttatcgcttaaggatgtgtcgacagtgagcggtgtgttgattggcgtgctgatggtggccatcaactggtactacaaacacaaaacctaccagctgctgcgcggcggaaaaattacacagggggaatatgaatccttcaaccgttaa

SEQ ID NO: 371 - DNA, 651 bp, artificial
  Centroid sequence
atgagcctgagtcccgcacggcagcaccgcctgcgcgtccaggctgaacaggccgcccgacagggcggcaatgttcgccacgcgacggggtatgacctgatgctgatgcagctggcggaggaccgccgccgcctgaaaggtatccagtccacagtgaagaaagcccaaatcaaagtggagctgctgccccgttattccgcctgggtggagggggtgttggctgctgatggtgcccggcaggatgacgtggtgatgtttgtaatgctctggcgtatcgatgccggggattatgccggtgcgctggatgcagggcgtcatgcgctgcggcacggatgggtgatgcccatcggaaaccgtaacgtccagacggtgctggcagaggaaatggcagacgctgcgcaggccgctctgctggcaggtgaatctttcgatgccgggttgctactgcagacactggagctgacagacggccaggatatgccagaccagtcacgggcacgcctgcataaagcgattggcgctgtactgaccgaaaccagcccggcctccgccctaaatcacatcaatcatgcgctgcagcttgatccacgctgtggcgtcaaaaaagaaaaacagcagctggagcgcagattgcgcaatgacagccgttaa

SEQ ID NO: 372 - DNA, 1053 bp, artificial
  Centroid sequence
atgaaaaagcacacacgttttgcctttaacgcctacctgcagcagctggcacgcctgaacaacgtggaagtagaagagctttccagcaaattcaccgttgagccgtcggtgcagcagacgctggaagaccagatccagcagtccgcggcatttctgaccatggttaacgtgattggtgtgacggaacagtcaggccagcttctgggcctgggcgtctgcagcaccattgccgggaccactgacacgaccacgaaggagcgcgagccaaccgatcccactgagatggtggatgttgagtacaaatgcgaacagaccaactttgatacggtgctgacctacgcaaaactggatatgtgggcgaaattccaggattttcaggtacgcatccgtaacgccatcgtgaaacgtcaggcgctggaccgtatcatgattggttttaatggcgtgaagcgtgccaaaacctcagaccgtgccgccaatccgttgctgcaggacgttaacaaaggctggctgcagaaggtccgcgaagatgccccggattgcgtgatgggcagcaccacggcagaagatggcacaaccaccgcagacccggtgaaggtaggcaagggcggtaaatatgccaacctggatgcgctggtgatggatgctgtcaatgagctgattgaccctattttccaagatgacgccgaactggtcgtgatctgtggtcgtgagctgttgtccgacaagtatttcccgctggtcaataaggaccaggcaaacacggaggcgctggctgctgatctgattatcagccagaaacgcatgggcggtctgcaggccgttcgcgccccgtcattcccggctaatgccgtactgatcacccgcctggataacctatccatctactggcaggaagatacccgccgccgttcggtcattgataacccgaaacgcgatcgtattgaaaacttcgaatccgtcaatgaggcgtatgtggtggaggattaccgctgcgtggcactggtggaaaacatcaccatcggcgacttcagcgccggtgccggagagtaa

SEQ ID NO: 373 - DNA, 1065 bp, artificial
  Centroid sequence
atgaaaaagaaaacccgttttgcctttaacgcctacctgcagcagctggcacgcctgaacaacgtggaagttgaagaactttccagcaaattcaccgttgagccgtcggtacagcagacgttggaagaccagatccagcagtccgctgcctttctgacactgattaacatcaccccggtggatgagcagtcaggccagctgctgggtctgggtgtcggtagcacgattgccggtaccacggataccaccgccaaagagcgcgaaccaactgacccgacgctgatggaagacgtggaatacaaatgcgaacagaccaactttgatacggtgctgacctacgcaaagcttgacctgtgggcaaagttccaggatttccaggtgcggatccgtaacgccatcgtgaagcgccaggctctggaccgcatcatgatcgggttcaacggcgtgaagcgtgccaaaacctctgaccgagacgccaacccgatgctgcaggacgtaaataagggctggctgcaaaaaatccgcgaagatgcgccggatcatgtcatgggcagcgaaaccaaagacggcgtgaccaccaaaggcgccgtgaaggttggtaagggtggcgattatgccaacctggatgccgtggtgatggatgcggtcaacgagctgatcgacccggtatatcaggatgatgatgatctggtggtggtctgtggccgtgagctgctgtctgacaagtatttcccgctggttaacaaaggccaggagaacacggagaagctggccgctgatctgatcatcagccagaaacgaatgggtggcctgcaggctgtacgcgcgccgtatttccctgcgaatgcactgctgatcacccgcctggataacctgtccatttactggcaggaagatacccgccgtcgttctgttatcgataacccgaaacgtgaccggatcgagaatttcgagtccgtcaatgaagcgtatgtggttgaggattaccgctgcgcggcgctggtcgaaaacatccagatgggggatttcagtgcgccagctgtaccggaaggcgagggggcataa

SEQ ID NO: 374 - DNA, 2409 bp, artificial
  Centroid sequence
gtggcagtgagtaaattcacattacataatgcaccaaccaccggcggctcgaatgaggccgccgtggccttttcatggaataaccccaaaaaagcggttaacccctatctggacccggcggaagttgcgccggagtctgcgctttcaaacctgatcgctctttacgctgcggataacgagcaggagcagctgcgccgtgaggcgctgagcgatgaggtctgggagcgctatttcttcattgaatcccgtgatcctgtccagcgcgaaatggagcaggaccggctgattagtcgtaccaaaatggcgcgcgagcagcagcgttttaatcctgatctggtcattctggctgacgttaacgccatgccgccacacatcagcaagcctttgctggaacggattaaatatttccatagcctgggtagggtaaaggcttattcccgctacctgcgcgaaacaatcaggccgtgtcttgagcggctggagcgcgtgcgtgacagtcaggtgtctgcctctttccggttcatggcgagccatgacgggctggaggggctgctggtactgcctgaaatgaatcaggatcaggtcaagcgcctttccacgctggttgcggcacatatgagcatgtgtctcgatgcggcctgtggtgatctgtttgtcagcgatgatgttaaaccagaagaaatccgccaggcatgggaaagggttgcagcagaggcgatgcgccttgaggtcatcccgcctgcctttgagcagttgcgccgcaaaaagcgccgccgcaagccggtgccttatgaactgatcccaccgtcgctggcccgtatgctgtgcgcggactggtggtatcgcaaactgtggcagatgcgctgcgagtggcgggaggaacagctgcgcgccgtctgcctggtcaacaagaaagcgtccccgtatgtcagctatgaagccgtgatccacaaacgcgagcagcgccgcaaatcgctggagttcttccgctcgcatgagctggtcaacgaggacggcgacacgctggacatggaagacgtggtgaacgccagcaacagcaacccggcacaccgccgtaatgaaatgatggcctgcgttaagggactggagctgatcgcggaaatgcgcggagactgcgcagtgttctataccatcacctgcccgtcacgcttccacgcaaccctcaacaacggcagacctaatccgaagtggaccagtgccactgtccgccagagcagtgactatctggttgatacgttcgccgctttccgcaaggcaatgcacaaggccgggctgcgctggtatggcgtccgcgttgcagagccacaccatgacggcaccgtgcactggcaccttctgtgcttcatgcgcaaaaaagaccgccgttccatcactgcgatgctgcgtaagtttgccatccgtgaagaccgcgaggagctgggcaccaacaccgggccgcgtttcaaatccgagctaatcaacccgcgcaagggcacgccgaccagctacatcgccaaatacatcagcaagaacatcgacgggcgcgggctggctaaagaaatcagcaaagaaaccggcagatcactgcgtgacagcgccgaacatgtcagcgcctgggcgtcactgcaccgtgtccagcaatttcgcttctttggtattccggggcgtcaggcataccgcgagctgcgattgctggctggtcaggcggcgagagtgcagggcgaacgcaaagcgggtgcgccggtactggataatccgcgtctggatgcggtactggcggcggctgatgcgggctgctttgccacctacatcatgaagcagggtggtgtgctggttccccgcaaacatcaccttgtccgcacggcatatgagcttaacgacgagccgagcgcctacggcgatcacggtatccgtatctatggcatctggtccccgattgcggagggcaagatttgcacgcacgcggtgaagtggaaaaaggttcgtaaggccgttgacgttcaggaggcggcagccgaccagggcgcttgcgccccttggactcgtggcaataactgtccccctgttgaaaatctgaacaaatcagggggtgatttacccgatattaaaaccatggatgagaaggagttgcaggaatatctccacaacatgggtcagaaggaacggcgggagctgacagccaggttaaggctggtaaaaccgaagcggaaaaaagcatacaaacagaatatttcggatcagcagcgcctgcagcttgaggcagagctgagttcaagagggttcgatggtagcgagtcagagattgacctgcttctgcgcggcggcagtattccgtcaggtggcgggctgcgtattttttaccgcaactaccgcctgcaggaagatgacaaatggcgtcagtggtactga

SEQ ID NO: 375 - DNA, 501 bp, artificial
  Centroid sequence
atggacagcgaggagcctccgaacgttcgggtcgcctgctcgggtgatatcgacgaggttgtgcggctgatgcacgacgctgcggcgtggatgtccgccaagggaacgcccgcctgggacgtcgcgcggatcgaccggacattcgcggagaccttcgtcctgagatccgagctcctagtcgcgagttgcagcgacggcatcgtcggctgttgcaccttgtcggccgaggatcccgagttctggcccgacgccctcaagggggaggccgcatatctgcacaagctcgcggtgcgacggacacatgcgggccggggtgtcagctccgcgctgatcgaggcttgccgccatgccgcgcgaacgcaggggtgcgccaagctgcggctcgactgccacccgaacctgcgtggcctatacgagcggctcggattcacccacgtcgacactttcaatcccggctgggatccaaccttcatcgcagaacgcctagaactcgaaatctaa

SEQ ID NO: 376 - DNA, 1032 bp, artificial
  Centroid sequence
atgactgagaataccgcacaggatgtgatgccacctgacgtacaacccaatgatgcagcgactacccaggcgttcagttttggcgatcccattccggtactggaccgccgcgaacttctggactacgtagaatgtgtgcaaatggaccgctggtatgagccgccggtgagctttgacgggctggcgcggacctatcgcgccgctgtacatcacagctcaccgattgctgttaagcgtgacattctcagtagtacctacatcccccaccgcctgctcagccagcaggcttttgcccgtttcgtccaggattatcttgtgttcggtaacgcctatctggaaaaacggacgaacaggctgggcggcgtcctgtcactggagccatcactggcgaagtacacccggcgcgggattgactttgatacttactggttcgtgcagtacggcatgaccacccagccttatgagttcaccaaaggtagcatctttcacctgatggagccggacattaaccaggaaatctacgggcttcccggctacctttccgcgatcccatcaacactgctcaacgagtcggctacgctgtttcgccgtaagtattacatcaacggcagtcacgccggattcatcatgtacatgactgatgcggcacagaatcaggaggacgtgaacaacatccgtcaggccatgaaaagcgccaaagggccgggcaacttccgcaacctgtttatgtattcgcccaacggtaaaaaggacggcatccagatcatcccgctgtcggaggtcgcggcgaaagatgagtttctgaacatcaagaacgtgagccgcgatgacatgatggcagcgcaccgcgtaccgccgcagatgatgggcattattcccaacaataccggcggctttggtgatgtggaaaaggccagccgcgtctttgtgcgcaacgagctgatgccgttgcagaagcgtctacaggagcttaacgactggctgggtgaggatgttatctcctttgaaccctacgagcttggcgccgagtag

SEQ ID NO: 377 - DNA, 1308 bp, artificial
  Centroid sequence
gtgccgaaacgactgagcaaaatgatcagtgatctactccctccggtggatttaacggagttgctgctcgaaattaacgcccataccggatttgctgatgagtttttccatgctagtgaagccagtgccagagttgatgatctgcccgtcagcatcagcgccgtgctgatggctgaagcctgcaatatcggtctggaaccactgatcagatcaaatgttcctgcactgacccgacaccggctgaactggacaaaagcgaactatctgcgggctgaaactatcaccagcgctaatgccagactggttgattttcaggcaacgctgccactggcacagatatggggtggaggagaagtggcatctgcagatggaatgcgctttgttacgccagtcagaacaatcaatgccggaccgaaccgcaaatactttggtaataacagagggatcacctggtacaactttgtgtccgatcagtattccggctttcatggcatcgttataccggggacgctgagggactctatctttgtgctggaaggtcttctggaacaggagaccgggctgaatccaaccgaaattatgaccgatacagcaggtgccagcgaacttgtctttggccttttctggctgctgggataccagttttctccacgcctggctgatgccggtgcttcggttttctggcgaatggaccatgatgccgactatggcgtgctgaatgatattgccagagggcaatcagatccccgaaaaatagtccttcagtgggacgaaatgatccggaccgctggctccctgaagctgggcaaagtacaggtttcagtgctggtccgttcattgctgaaaagtgaacgtccttccggactgactcaggcaatcattgaagtggggcgcatcaacaaaacgctgtatctgcttaattatattgatgatgaagattaccgccggcgcattctgacccagcttaatcggggagaaagtcgccatgccgttgccagagccatctgtcacggtcaaaaaggtgagataagaaaacgatataccgacggtcaggaagatcaactgggcacactggggctggtcactaacgccgtcgtgttatggaacactatttatatgcaggcagccctggatcatctccgggcgcagggtgaaacactgaatgatgaagatatcgcacgcctctccccgctttgccacggacatatcaatatgctcggccattattccttcacgctggcagaactggtgaccaaaggacatctgagaccattaaaagaggcgtcagaggcagaaaacgttgcttaa

SEQ ID NO: 378 - DNA, 492 bp, artificial
  Centroid sequence
atgactattatcatgattctgctcgccgtcgccggtggcgccatgctgagtatccaggcggctatcaatggccagctgggcagcaaggtcggcgtattcaaaagcgcgttcctgacattttctgtcggcgccctggtgacggggctgctgatcttcttcttcgaacccaaacacaccttgacgttgatggacgtgcctaaatggcagctgctgggcgcaatgtttggcgtaccgtatatcgtcattatggtactggccgtccagcgtattggcgcggcagtggctacggtcgctgtcatttttggccagttaaccatgagcatgctgatcgataacttcggctggctgggcaatgcgtcgattccattctcgatgagccgaatcggcgccattatctgcctgggtatcgcgctgttcttcatttactccagcagtaagtcaaaagccgcaatggcgaaaactccccggcagcaggaaaacgctaacacataa

SEQ ID NO: 379 - DNA, 936 bp, artificial
  Centroid sequence
atgaatgagcccgggaacatcagcatacgcaccctgctgatttttatagacgtttatgaaacgcagaatttctctgtggtggcacggcgggaagggatatctgcctctcaggtatcgcgcgtcatccatcaaatggaggatgcgctcgggcagcagctcttttatcgtaatacccgggcgatcatccctacggaaagcggccatctttttatcggctatgcgcgggccatgacgggcagcctggaggaggcgcggcgggaactcaacgagagaacgcttgagccttcaggaatggtccgcataaacgcaccggtgttctttggacagcggcatgtggcacccgcgttagccggtctaacggagcgatatccgaggctcagcattgatctcacgctgaccgatgattacatcgatccgcaccgggagcaggctgacgtaattttccggattggcgtgctgacggactcctcatttcatgcacgtgtgtttggccagcagttctatcatcttgccgcatcaccggattacatccgccggcacggcatacctgaatcacctgaagagttcgcacgtcataaatgcctggtctatcgcggctcgtcaggaccaaaccgctggttgctgcgcaggcacggggaggaatgggtgcactatcccgtctcgcccctaatgtcatccaataatgctgaaacgctgctgattgccgcactcggggggatggggatcgtgctgtttcctgactggctgattggagaccggctgaagagcggcgagcttgtcgtgctgctgccggagctggacacgtccataaaaacggagccgcagcacatcgcggcaatctacccgaatgcccgccaccctccgctgaacgttcgggcgattatcgattactaccttgacgcgttcggctcaccgctttactggcagtctgaataa

SEQ ID NO: 380 - DNA, 816 bp, artificial; identical to SEQ ID NO: 63
  Centroid sequence

SEQ ID NO: 381 - DNA, 708 bp, artificial
  Centroid sequence
atgacgagttcgcagcccgccggatggacggcggccgagttggcgcaggcggcggcgcgcggacagcttgacctgcattaccagccgctggtcgatctgcgcgatcaccggatcgctggcgcggaagcgttgatgcgctggcggcatccgaggcttggcctgttgccgcccggccagttcctgccgctggccgagtcgttcggcctgatgccggaaataggcgcgtgggtgctgggcgaggcctgtcgccagatgcacaagtggcaaggaccggcatggcaaccgttccgtcttgccatcaatgtgtccgccagccaggttgggccaacgttcgacgacgaggtaaagcgggtgctggccgatatggccctgcccgccgagcttctggagatcgaactgaccgaatcggtcgcattcggcaatccagccctgttcgccagtttcgacgccttgcgcgccatcggcgtgcgcttcgccgccgacgacttcggcaccggctattcctgcctgcaacatctgaaatgctgccccatcaccacattgaaaatcgaccaatcctttgtcgccaggctcccggatgatgcccgtgaccaaactatcgtgcgggcggtgatccagctcgcgcacgggctgggcatggatgtcattttcagaagacgactgcaccagttgattgggcgtaatggctgttgtgcagccagctcctga

SEQ ID NO: 382 - DNA, 816 bp, artificial
  Centroid sequence
atgagccatattcaacgggaaacgtcttgctcgaggccgcgattaaattccaacatggatgctgatttatatgggtataaatgggctcgcgataatgtcgggcaatcaggtgcgacaatctatcgattgtatgggaagcccgatgcgccagagttgtttctgaaacatggcaaaggtagcgttgccaatgatgttacagatgagatggtcagactaaactggctgacggaatttatgcctcttccgaccatcaagcattttatccgtactcctgatgatgcatggttactcaccactgcgatccccgggaaaacagcattccaggtattagaagaatatcctgattcaggtgaaaatattgttgatgcgctggcagtgttcctgcgccggttgcattcgattcctgtttgtaattgtccttttaacagcgatcgcgtatttcgtctcgctcaggcgcaatcacgaatgaataacggtttggttgatgcgagtgattttgatgacgagcgtaatggctggcctgttgaacaagtctggaaagaaatgcataagcttttgccattctcaccggattcagtcgtcactcatggtgatttctcacttgataaccttatttttgacgaggggaaattaataggttgtattgatgttggacgagtcggaatcgcagaccgataccaggatcttgccatcctatggaactgcctcggtgagttttctccttcattacagaaacggctttttcaaaaatatggtattgataatcctgatatgaataaattgcagtttcatttgatgctcgatgagtttttctaa

SEQ ID NO: 383 - DNA, 660 bp, artificial; identical to SEQ ID NO: 54
  Centroid sequence

SEQ ID NO: 384 - DNA, 858 bp, artificial
  Centroid sequence
gtgaagctcgatcagaccaacaatcgtatatcgcttcctaagttgggctggatacgctatcgcaatagccgtgaagtcatcggcgaagttaaaaacgtcacggtcatccagtcatgcggcaaatggtacgttagcatccagacggaatacgaagtgcctgaacaggttcataaggcagcgtcaatggtcggtttggacgccggagtcacgaaacttgccacgctttctgatggcaccgtataccagccagtcaacagcttcaaagcaagccagcgtaagctggctatgcttcaacggcagttaagccgcaaagttaaattcagtgccagttggcagaaacagaagaaaaaaatccagcgtctgcactcacacattgccaatatccggcgcgactaccttcacaaagtcaccagtgaaatcagcaaaaaccacgcgatgatcgtcattgaggacttgaaggtcagtaacatgtcgaaatcggcaaaaggtacggcagagcggcccggacgaaacatcagagccaaatcaggcttaaaccgttcgatactggatcagggctggtacgaaatgcgcagacagcttgagtacaagcagctctggcgtggtggtcaggtactggcgatacctccggcatacacaagccagcgttgtgcctgctgtggtcatacggcgaaagaaaaccgtcaaacgcaaagtaaattcgtgtgtcaggtatgcggctataccgagaacgccgatatcaacggagcacgtaacattttagcggcaggacatgccgtgcttgcctgtggagggatgatacagtcgggccgcccgctgaagcaggaacccaccgaggcgagtcaggctccggtctga

SEQ ID NO: 385 - DNA, 681 bp, artificial
  Centroid sequence
atgacaccagaaattatcctggctcgtacaggtattgacgttagcaacatcgagcaaggtgatgacgcgtggcaccgtctacgcctcggtgtcatcactgcttccgaagttcacaacgtcatttccaggccaaagtcgggcaagaagtggactgatatgaagatgtcctactttctcacccttcttgccgaagtttgcaccggcgtggcaccggaagttaacgccagggcgctggcctgggggaaacagtatgaagatgatgcccgcaccctgtttgagttcaccactgacgtgaaagtcaccgggtcgccgatccttttccgtgacgaggacatgcgtaccgcctgttctcctgacggcctgtgcagtgatggccgcggtcttgagttgaaatgccctttcacctctcgcgactttatgaaattcaggcttggcggcttcgaggctatcaaatccgcctatatggcccaggtgcaattcagcatgtgggtaaccgggatagatgcctggtatttcgcgaattatgacccgcgcatgaagcgagaaggcattcaccacgtggttgttgagcgcgacgacaaatacatgtccctcttcaatgaaatggtaccggaatttatcgaaaagatggacgaagcgctaaaggagattggcttcacgttcggggagcagtggcgatga

SEQ ID NO: 386 - DNA, 2970 bp, artificial
  Centroid sequence
atgccgcgccgctcaatcctgtccgccaccgagcgcgaaagcctgctggcactaccagatgccaaagacgaactgatacggcactacacgttcaacgaaaccgacctatcggtgatccgccagcgtcgcggcgctgcgaatcgattgggcttcgccgtgcagctttgctacttgcgattccctggcatcttcttgggcatcgatgagcctccgtttccgcccctgttgcgcatggtggccgcacaactcaaggtgccggtggaaagttggaacgattacggccagcgcgagcagacgcggcgggagcacttggtcgagctgcaaacggtgttcgggttcaagcccttcaccatgagtcactaccggcaagccgtgcatacattgaccgagctggccttgcagaccgataaagggattgtgctggccagcacccttgtcgaaaacctgcggcggcagagcatcatcctgcccgccatgaatgccatcgagcgcgcgagcgccgaggccatcacccgtgccaaccggcgtatttacgcggcgttgaccgattctttgttatcgctccaccgtcagcgcctggacgaacttctcaagcgcaaggacggcagcaaattgacgtggctggcatggctgcgccagtcgcccgtcaagccgaactctcggcatatgcttgaacacatcgagcgcctcaaggcttggcaggcgcttgaccttcccgcaggcatcgagcgacaagttcaccagaaccgcctgctcaagatcgcccgtgagggtgggcagatgacgcctgccgatctggcaaagttcgagatgcaacgacgctatgccactctggtttcgctggccattgaaggcatggccaccgtcaccgacgaaatcatcgacctgcacgaccgcatcattggcaaactattcaacgccgccaagaacaagcatcagcagcagtttcaggcttccggcaaggcgatcaatgacaaggtgcggatgtatggccgcatcggccaagccttgctggaagccaaacagagcggcggcgatccgttcgccgccatcgaggccgtaatgccgtgggataccttcgccgccagcgtcacggaggcgcaaaagctcgcgcagccggagagcttcgactttctgcatcgcatcggtgaaagctacgccacgttgcgccgctacgcgccgcagttcctggacgtacttaagttacgggcggcaccagccgccaagggcgtactcgatgccatcgaggtgcttcgcggcatgaacagcgacaacgcccgcaaggtgcccgccgacgcgccgaccgcattcatcaagccacgctgggcgaaactggtgctcacggacgatggcattgaccggcgctactacgagctgtgcgccctgtcagagctaaagaacgcgctgcgatcaggcgatgtctgggtgcagggttcgcgccagttcaaggactttgatgagtacctggtgccggccgagaagttcgctactctgaagctggccaacgaattgtcgctggcagtggccaccgattgcgatcagtatttgcacgaccgactggcattgctggaacagcagcttgccaccgtcaaccgcatggcggcggccaatgatctgccggatgccatcattaccgagtccggcctgaagatcacgccgctggacgcggcggtgccggagaccgcacaagccctaatcgaccagtcggcgatgctgctgccacacgtcaagattaccgaactgctgatggaagttgatgagtggacaggcttcacccggcatttcacgcatctgaagaccggcgacacggccaaggacaaaaccttgctgctgacgacgatcctggctgatggcatcaatctcgggctaaccaagatggccgagtcctgcccaggcacgacttacgccaagctgtcgtggctgcaagcctggcacatccgggatgaaacgtactcaacggcgctggccgaactggtcaacgcgcagttccggcaatcctttgccggaaactggggcgatggcaccacgtcatcgtcggatggccaaaatttcagaaccggcagcaaagcggagagcaccgggcatatcaacccgaagtatggaagcagtccaggccggacgttttatacccatatctccgaccagtacgcgcccttcagcaccaaggtagtcaacgtcggcgtgcgtgattcaacctatgtgctcgatggcctgctgtaccacgagtcggacttgcggatcgaggagcactacaccgacacagcgggctttaccgatcatgtcttcggcctgatgcacctactgggcttccgattcgcgccacgtatccgagacctgggcgacaccaagctattcatcccaaagggcgatgccgcctatgacgcgctcaagccgatgattagcagcgaccggctgaacatcaagcagatacgcgcccattgggatgaaatcttgcggttcgccacttcgatcaagcagggtacggtgacggcctcgctgatgttgcgcaagctcggcagctatccgcgtcagaacggactggccgttgcactgcgcgagctggggcgcattgagcgcacgctgttcatactggattggctgcaaagcgtggagctgcgccgccgcgtgcaggccggactcaacaaaggcgaggcgcgcaacgcgctggccagggcggtgttcttcaaccgactgggcgaaatccgcgaccgcagttttgagcaacaacgctaccgggccagcggcctcaatctggtaacggcggccatcgtgctttggaacacggcctatctggaacgggcaaccaatgctttgaacgggcacggcaaaccggtagacgagacgctgtttcaatacctgtcaccgctggggtgggaacacatcaatctgaccggcgattacctctggcgcagcagcaccaaggtcggcgcaggcaagttcagaccgttgcgaccactgccaccggcttaa

SEQ ID NO: 387 - DNA, 861 bp, artificial; identical to SEQ ID NO: 338
  Centroid sequence

SEQ ID NO: 388 - DNA, 396 bp, artificial
  Centroid sequence
gtgatcgaaatccagatccttgacccgcagttgcaaaccctcactgatccgcatgcccgttccatacagaagctgggcgaacaaacgatgctcgccttccagaaaaccgaggatgcgaaccacttcatccggggtcagcaccaccggcaagcgccgcgacggccgaggtcttccgatctcctgaagccagggcagatccgtgcacagcaccttgccgtagaagaacagcaaggccgccaatgcctgacgatgcgtggagaccgaaaccttgcgctcgttcgccagccaggacagaaatgcctcgacttcgctgctgcccaaggttgccgggtgacgcacaccgtggaaacggatgaaggcacgaacccagtggacataagcctgttcggttcgtaa

SEQ ID NO: 389 - DNA, 840 bp, artificial; identical to SEQ ID NO: 339
  Centroid sequence

SEQ ID NO: 390 - DNA, 348 bp, artificial; identical to SEQ ID NO: 340
  Centroid sequence

SEQ ID NO: 391 - DNA, 594 bp, artificial
  Centroid sequence
atgagttgtccgatattcgatttaaggtacatttttatgcgactttttggttacgctcgggtctcaaccagtcagcagtctcttgatcttcaggtcagagcactcaaagacgcaggtgtgaaagcaaaccgtatatttaccgataaggcatccggcagttcaacagaccgggaagggctggatttgctgaggatgaaggtggaggaaggtgatgtcattctggttaagaagctcgaccgtcttggccgcgacactgccgatatgatccaactgataaaggaatttgacgctcagggcgtggcagtccggttcattgatgacgggatcagtaccgacggtgatatggggcaaatggtggtcaccatcctgtcggctgtggcacaggctgaacgccggaggatcctagaacgcacgaatgagggccgacaggaagcaaagctgaaaggaatcaaatttggccgcaggcgtaccgtggacaggaacgtcgtgctgacgcttcatcagaagggcactggtgcaacggaaattgctcatcagctcagtattgcccgctccacggtttataaaattcttgaagacgaaagggcctcgtga

SEQ ID NO: 392 - DNA, 1308 bp, artificial; identical to SEQ ID NO: 377
  Centroid sequence

SEQ ID NO: 393 - DNA, 321 bp, artificial
  Centroid sequence
atgcgctcacgcaactggtccagaaccttgaccgaacgcagcggtggtaacggcgcagtggcggttttcatggcttgttatgatttttttgtacagtctatgcctcgggcatccaagcagcaagcgcgttacgccgtgggtcgatgtttgatgttatggagcagcaacgatgttacgcagcagggcagtcgccctaaaacaaagttaacccaggatgagaaccttgaaagtatcattgatggctgcgaaagcgaaaaacggcgtgattggttgcggtccagacataccctggtccgcgaaaggggagcagctactttttaa

SEQ ID NO: 394 - DNA, 1014 bp, artificial; identical to SEQ ID NO: 353
  Centroid sequence

SEQ ID NO: 395 - DNA, 846 bp, artificial; identical to SEQ ID NO: 72
  Centroid sequence

SEQ ID NO: 396 - DNA, 804 bp, artificial; identical to SEQ ID NO: 82
  Centroid sequence

SEQ ID NO: 397 - DNA, 549 bp, artificial
  Centroid sequence
atgttatggagcagcaacgatgttacgcagcagggcagtcgccctaaaacaaagttagccattaagggagttaaattgaaaatatcattgatttctgcagtgtcagaaaatggcgtaatcggtagtggtcctgatatcccgtggtcagtaaaaggtgagcaactactctttaaagcgctcacatataatcaatggctccttgtcggaagaaaaacatttgactctatgggtgttcttccaaatcgcaaatatgcagtagtgtcaaagaacggaatttcaagctcaaatgaaaacgtcctagtttttccttcaatagaaaatgctttgaaagagctatcaaaagttacagatcatgtatatgtctctggcgggggtcaaatctataatagccttattgaaaaagcagatataattcatttgtctactgttcacgttgaagtcgaaggtgatatcaaattccctataatgcctgagaatttcaatttggtttttgaacagttttttatgtctaatataaattatacataccagatttggaaaaaaggctaa

SEQ ID NO: 398 - DNA, 816 bp, artificial; identical to SEQ ID NO: 63
  Centroid sequence

SEQ ID NO: 399 - DNA, 1206 bp, artificial
  Centroid sequence
atgacgaataaccctaccgatgacagcagaccatggtcggtctttcttatttttctgcggcttggattgacatcttttggcggccccattgcgcacttgggctacttccgcgccgaatttgtcacacggcggcgctggctctccgaacggagctatgctgacttggtcgcgctttgtcagttcttgccagggcctgcaagcagccaggtcggcatagcggtaggactgtctcgggctggatacagcggggcgctggctgcttgggctggcttcacgctgccgtctgccatagccttgatcctttttgcgctcggcatctccagctatggcgattacgtctcgcagggcgcgttgcatggcttaaaagtggtggctgtggccgtggtcgctcaagcagtatggggcatggcgcgtaacctatgcacggatgggctgcgagtcaccatcatggcaattgctacctgcgtcgttttacttgtgccgtccgcgtggggacaggttggcgtgattgctatcgcaggcatcgcaggccggttattgttcaagccagcgaaagttgttgagcatgaccccctacctatcacggtcagtcaccgggccggcgtgctttggctctcgctgttctttgtcttgctgattggcctgccggtgttggccgaactgatgccaagtcaaaccatggcaatggtggattccttctatcgtgtcggatcactggtgttcggcggtggtcacgttgtgctgccattactgcaagccgaagtggtgccctccggctgggtcaacaatgaatcctttctcgcggggtacggggcagctcaagcggtgcccggccctttgttcacgttcgccgcgtttcttggtgcctcgatgaacaccgccccgtcgggctggatcggcggcattgtgtgtctgctggctatcttcgcgccctcgttcttgctggtcgtcggatcaatgccattttgggagcgtttgcgccgcaatacaggcatccaagctgcgctggccgggatcaatgccgctgtagtcggcttgctgctggccgcgctgtatcagcctgtatggactagcgccatctttcagccgcaagacttcggcttggcattagttgcccttgtcgcacttatgttctggaagctcccgccgtggctggttgtcctcggtagcggtgcagctgggtggctgttgagcgtcgctctgtga

SEQ ID NO: 400 - DNA, 258 bp, artificial
  Centroid sequence
atgcataccacccgactgaagaaggttggcggctcagttatgctgaccgtcccaccggcactgctgaatgcgctgtctctggggacagataatgaagttggcatggtcattgataatggccggctgatcgttgagccgcacaggcgcccgcaatattcactggctgagctactggcacagtgtgatccgaatgctgaaatatcagctgaagaacgagaatggctggatgcaccggcgactggtcaggaggaaatctga

SEQ ID NO: 401 - DNA, 402 bp, artificial
  Centroid sequence
atgctgaaatatcagctgaagaacgagaatggctggatgcaccggcgactggtcaggaggaaatctgacatggaaagaggggaaatctggcttgtctcgcttgatcctaccgcaggtcatgagcagcagggaacgcggccggtgcttattgtcacaccggcggcctttaatcgcgtgacccgcctgcctgttgttgtgcccgtaaccagcggaggcaattttgcccgcactgccggctttgcggtgtcgttggatggtgttggcatacgtaccacaggtgttgtgcgttgcgatcaaccccggacaattgatatgaaagcccgaggcggaaaacgactcgaacgggttccggagactatcatgaacgaagttcttggccgcctgtccactattctgacttga

SEQ ID NO: 402 - DNA, 585 bp, artificial
  Centroid sequence
atgccccgccccaagctcaagtccgatgacgaggtactcgaggccgccaccgtagtgctgaagcgttgcggtcccatagagttcacgctcagcggagtagcaaaggaggtggggctctcccgcgcagcgttaatccagcgcttcaccaaccgcgatacgctgctggtgaggatgatggagcgcggcgtcgagcaggtgcggcattacctgaatgcgataccgataggcgcagggccgcaagggctctgggaatttttgcaggtgctcgttcggagcatgaacactcgcaacgacttctcggtgaactatctcatctcctggtacgagctccaggtgccggagctacgcacgcttgcgatccagcggaaccgcgcggtggtggaggggatccgcaagcgactgcccccaggtgctcctgcggcagctgagttgctcctgcactcggtcatcgctggcgcgacgatgcagtgggccgtcgatccggatggtgagctagctgatcatgtgctggctcagatcgctgccatcctgtgtttaatgtttcccgaacacgacgatttccaactcctccaggcacatgcgtaa

SEQ ID NO: 403 - DNA, 789 bp, artificial
  Centroid sequence
atgggtgaatttttccctgcacaagttttcaagcagctgtcccacgctcgcgcggtgatcgagcgccatctggctgcgacactggacacaatccacctgttcggatctgcgatcgatggagggctgaagccggacagcgacatagacttgctcgtgaccgtcagcgccgcacctaacgattcgctccggcaggcgctaatgctcgatttgctgaaagtctcatcaccgccaggcgatggcggaacatggcgaccgctggagctaactgttgtcgctcgaagcgaagtagtgccttggcgctatccggcgcggcgtgagcttcagttcggtgagtggctccgccacgacatcctttccggaacgttcgagcctgccgttctggatcacgatcttgcgattttgctgaccaaggcgaggcaacacagccttgcgcttctaggcccatccgcagccacgtttttcgagccggtgccgaaggagcatttctccaaggcgcttttcgacactattgcccagtggaatgcagagtcggattggaagggtgacgagcggaacgtcgttcttgctcttgctcgcatttggtacagcgcttcaactggtctcattgctcctaaggacgttgctgccgcatgggtatcggagcgtttgcctgccgagcatcggcccctcatctgcaaggcacgcgcggcgtacctgggtagcgaggacgacgacctagcaatgcgcgtcgaagagacggccgcgttcgttcgatatgccaaagcaacgattgagagaatcttgcgttga

SEQ ID NO: 404 - DNA, 906 bp, artificial
  Centroid sequence
atgaccgtagtcacgaccgccgatacctcccaactgtacgcacttgcagcccgacatgggctcaagctccatggcccgctgactgtcaatgagcttgggctcgactataggatcgtgatcgccaccgtcgacgatggacgtcggtgggtgctgcgcatcccgcgccgagccgaggtaagcgcgaaggtcgaaccagaggcgcgggtgctggcaatgctcaagaatcgcctgccgttcgcggtgccggactggcgcgtggccaacgccgagctcgttgcctatcccatgctcgaagactcgactgcgatggtcatccagcctggttcgtccacgcccgactgggtcgtgccgcaggactcggaggtcttcgcggagagcttcgcgaccgcgctcgccgccctgcatgccgtccccatttccgccgccgtggatgcggggatgctcatccgtacaccgacgcaggcccgtcagaaggtggccgacgacgttgaccgcgtccgacgcgagttcgtggtgaacgacaagcgcctccaccggtggcagcgctggctcgacgacgattcgtcgtggccagatttctccgtggtggtgcatggcgatctctacgtgggccatgtgctcatcgacaacacggagcgcgtcagcgggatgatcgactggagcgaggcccgcgttgatgaccctgccatcgacatggccgcgcaccttatggtctttggtgaagaggggctcgcgaagctcctcctcacgtatgaagcggccggtggccgggtgtggccgcggctcgcccaccacatcgcggagcgccttgcgttcggggcggtcacctacgcactcttcgccctcgactcgggtaacgaagagtacctcgctgcggcgaaggcgcagctcgccgcagcggaatga

SEQ ID NO: 405 - DNA, 1239 bp, artificial
  Centroid sequence
atgagcgaacgtcgatatagcccgctcgcgacgctgttcgcggcgacctttctcttccggatcggcaacgcggtggcggccctcgcgcttccatggttcgtcctgtctcatacaaagagcgcggcctgggcgggcgccacggccgctagcagcgtcatcgcgaccatcatcggcgcgtgggttggtggtggcctcgtcgatcggttcgggcgcgcgcccgtcgcattgatctcgggtgtggtgggcggcgtggccatggcgagcatcccactgctcgatgccgttggcgccctctcgaacactgggctgatcgcttgcgtggtgctcggtgccgcgttcgacgcacccggtatggccgcgcaggacagtgagctgcccaaactcggccacgtcgccgggctctccgttgagcgcgtctcgtcactgaacgcggtgatcgggaacgtcgcgattctaggtggcccggcccttgggggggccgcaatcggcctgcttggcgctgcgccaacgctcgggctgacggcgttctgctccgtccttgcaggtctgctcggcgcgtgggtgcttcccgcgcgtgccgctcggacgatgaccacgacggcgactctctccatgcgcgccggcgtcgcttttctctggagcgaacccctgctgcgccctctctttggtatagtgatgatcttcgtgggcatcgttggcgccaacggcagcgtcatcatgcctgcgctgtttgtagatgcaggacgccaagtagcagagctcgggctgttctcctcaatgatgggggctggtggtctccttggcattgccattcatgcgtcggtcggcgcccggatatcagcgcagaactggctggcggtggcattttgtggctctgcggtgggctcgcttctgctttcacagttgccaggcgtgccggtgctgatgttgttgggcgcgctcgtgggactgctgaccggctcagtctctcccattctcaacgctgccatctacaaccgcacgccgccagaacttctcggccgggtactcggcacggtctcggcggtgatgctgtcagcctcgcccatggttatgcttgcggccggcgcgtttgtcgaccttgctggtccgctccctggcctcgttgtatcggccgtgtttgcggggctcgtggctctactctcgctccgtcttcaatttgctacaatggcggcggcagccacagcctccgccccaacccatacagaaggtgaacactga

SEQ ID NO: 406 - DNA, 933 bp, artificial
  Centroid sequence
atgggttcatgtgcagctccatcagcaaaaggggatgataagtttatcaccaccgactatttgcaacagtgccagccgggacggctgttctatacccatatctccgaccagtacgcgccgttcagcacccgcgtggtgaatgtcggcgtccgcgattccacctatgtgctcgacggcctgctgtaccacgagtccgacctgcggatcgaggagcactacaccgacacggccggcttcaccgatcacgtctttgccctgatgcacctgctaggcttccgcttcgcgccgcgcatccgcgacctcggcgaaaccaagctgtacgtgccgcagggcgtgcaagcctacccgacgttgcgcccgctgatcggcggcaccctgaacatcaagcacgtgcgtgcccactgggacgacatcctgcgcctggccagctcgatcaagcagggcaccgtcaccgcctcgctgatgctgcgcaagctcggcagctacccgcgccagaacggactggccgtggccctgcgcgagctgggccggatcgagcgcacgctgttcatcctggactggctgcaaagtgttgaactgcgccgccgcgtgcatgccggcctgaacaaaggtgaggcgcgcaactcgctggccagggcggtgttcttcaaccgccttggggaaatcagggatcggagcttcgagcagcagcgctaccgggccagcggcctcaacctggtgacggcggctatcgtgctgtggaacacggtgtacctggaacgcgccacccaggggttggtcgaggccggcaagccggtggacggcgagctgctgcaattcctgtcgccgctgggctgggagcacatcaacctaaccggcgattacgtctggcggcagagccgcagactggaagacgggaagtttcggcccttacggatgcccggaaaaccttag

SEQ ID NO: 407 - DNA, 1263 bp, artificial
  Centroid sequence
atgattaataaaattgatttcaaagctaagaatctaacatcaaatgcaggtctttttctgctccttgagaatgcaaaaagcaatgggatttttgattttattgaaaatgacctcgtatttgataatgactcaacaaataaaatcaagatgaatcatataaagaccatgctctgcggtcacttcattggcattgataagttagaacgtctaaagctacttcaaaatgatcccctcgtcaacgagtttgatatttccgtaaaagaacctgaaacagtgtcacggtttctaggaaacttcaacttcaagacaacccaaatgtttagagacattaattttaaagtctttaaaaaactgctcactaaaagtaaattgacatccattacgattgatattgatagtagtgtaattaacgtagaaggtcatcaagaaggtgcgtcaaaaggatataatcctaagaaactgggaaaccgatgctacaatatccaatttgcattttgcgacgaattaaaagcatatgttaccggatttgtaagaagtggcaatacttacactgcaaacggtgctgcggaaatgatcaaagaaattgttgctaacatcaaatcagacgatttagaaattttatttcgaatggatagtggctactttgatgaaaaaattatcgaaacgatagaatctcttggatgcaaatatttaattaaagccaaaagttattctacactcacctcacaagcaacgaattcatcaattgtattcgttaaaggagaagaaggtagagaaactacagaactgtatacaaaattagttaaatgggaaaaagacagaagatttgtcgtatctcgcgtactgaaaccagaaaaagaaagagcacaattatcacttttagaaggttccgaatacgactactttttctttgtaacaaatactaccttgctttctgaaaaagtagttatatactatgaaaagcgtggtaatgctgaaaactatatcaaagaagccaaatacgacatggcggtgggtcatctcttgctaaagtcattttgggcgaatgaagccgtgtttcaaatgatgatgctttcatataacctatttttgttgttcaagtttgattccttggactcttcagaatacagacagcaaataaagacctttcgtttgaagtatgtatttcttgcagcaaaaataatcaaaaccgcaagatatgtaatcatgaagttgtcggaaaactatccgtacaagggagtgtatgaaaaatgtctggtataa

SEQ ID NO: 408 - DNA, 453 bp, artificial
  Centroid sequence
atggccggcagcagcccgtcgttgcctgatggatccaacccctccgctgctatagtgcagtcggcttctgacgttcagtgcagccgtcttctgaaaacgacaatggaggtggtagccgagggtgtggaaacacccgactgccttgcgtggttgcggcaggcgggttgcgacacggtgcagggtttcctgttcgccaggccgatgccggcggcggccttcgtcggcttcgtcaaccaatggaggaacaccaccatgaacgccaatgaaccgagcaccagttgctgcgtgtgctgcaaggaaatcccgctcgatgccgccttcacgccggaaggggccgagtacgtggagcatttctgcgggctggagtgctatcagcgcttccaggcgcgggccagcactgcgaccgaaaccagcgtcaaaccggacgcttgtgattcgccgccgtcaggttga

SEQ ID NO: 409 - DNA, 717 bp, artificial
  Centroid sequence
atggagctgcacatgaacccattcaaaggccggcattttcagcgtgacatcattctgtgggccgtacgctggtactgcaaatacggcatcagttaccgtgagctgcaggagatgctggctgaacgcggagtgaatgtcgatcactccacgatttaccgctgggttcagcgttatgcgcctgaaatggaaaaacggctgcgctggtactggcgtaacccttccgatctttgcccgtggcacatggatgaaacctacgtgaaggtcaatggccgctgggcgtatctgtaccgggccgtcgacagccggggccgcactgtcgatttttatctctcctcccgtcgtaacagcaaagctgcataccggtttctgggtaaaatcctcaacaacgtgaagaagtggcagatcccgcgattcatcaacacggataaagcgcccgcctatggtcgcgcgcttgctctgctcaaacgcgaaggccggtgcccgtctgacgttgaacaccgacagattaagtaccggaacaacgtgattgaatgcgatcatggcaaactgaaacggataatcggcgccacgctgggatttaaatccatgaagacggcttacgccaccatcaaaggtattgaggtgatgcgtgcactacgcaaaggccaggcctcagcattttattatggtgatcccctgggcgaaatgcgcctggtaagcagagtttttgaaatgtaa

SEQ ID NO: 410 - DNA, 1305 bp, artificial
  Centroid sequence
atgctcaatactcgtgtgcaccaaagcgaggtgagcatggcgacggacaccccacggattccagaacaaggcgtggccactctgcctgatgaggcttgggagcgtgcgcgccgtcgtgcggagatcatcagtccgttggcgcagtcggagacggtcgggcacgaagcggccgatatggcggctcaggcgctgggcttgtctcggcgccaggtatacgttctgatccggcgtgcccggcaaggcagcggcctcgtgacggatctggtgcccggccagtccggtggaggtaaaggtaaggggcgcttgccggaaccggtcgagcgcgtcatccacgagctactgcaaaagcggttcctgaccaagcagaagcgcagcctagcggcctttcaccgcgaagtcactcaggtgtgcaaggctcaaaaactgcgagtgccggcgcgcaataccgtggccttacggatcgctagccttgacccgcgcaaggtcatccgccggcgggaaggccaggatgccgctcgtgacctacaaggtgtgggcggcgagcctcctgccgtgaccgcgccgctggagcaggtgcagatagaccatacggtcatcgacctgatcgtggtcgatgaccgcgaccggcaacctattggccgcccgtacctgaccctcgccatcgacgtgttcacccgctgcgtgctcggcatggtcgtcacgctggaagcgccgtctgccgtttcggttggcctgtgcctcgtgcatgtcgcctgcgacaagcgcccttggctggaaggactgaacgtggaaatggattggcagatgagcggcaagcccttgctgctctacctagacaacgcggccgagttcaagagcgaggccctgcgccggggttgcgagcagcatggcatccggctggactatcgcccgctgggacagccgcactatggcggcatcgtggaacggatcatcggcacggcgatgcagatgattcacgacgaactgccgggaacgaccttctccaaccctgaccagcgcggcgactacgattccgaaaacaaggccgccctgacgctgcgcgagctagagcgctggctcacattggcggtcggcacctaccacggttcggtgcacaacggcctgctccaaccgccggccgcgcgctgggccgaggccgtggcgcgtgtcggcgtaccggccgtcgtcacacgcgctacttcgttcctggtcgattttctgccgatcctccggcgcacgctgacccgcaccggctttgtcatcgaccacatccactactacgccgatgggcactgttgcaaatag

SEQ ID NO: 411 - DNA, 237 bp, artificial
  Centroid sequence
gtgaacgcccctgacaaactgccgcccgagacgcgccaacccgtttccggctacctgtggggtgcgctggccgtgttgacctgcccctgccatctgccgattctcgccgccgtgctggccgggacgaccgccggtgccttccttggcgagcattggggtgttgccgcgctcgcgctgaccggcttgttcgttctggccgtaacgcggctgctgcgcgccttccggggcggatcatga

SEQ ID NO: 412 - DNA, 1695 bp, artificial
  Centroid sequence
atgagcactctcaaaatcaccggcatgacttgcgactcgtgcgcagtgcatgtcaaggacgccctggagaaagtgcccggcgtgcaatcagcggatgtctcctacgccaagggcagcgccaagctcgccattgaggtcggcacgtcacccgacgcgctgacggccgctgtagctggactcggttatcgggccacgctggccgatgccccctcagtttcgacgccgggcggattgctcgacaagatgcgcgatctgctgggcagaaacgacaagacgggtagcagcggcgcattgcatatcgccgtcatcggcagcggcggggccgcgatggcagcggcgctgaaggccgtcgagcaaggcgcacgtgtcacgctgatcgagcgcggcaccatcggcggcacctgcgtcaatgtcggttgtgtgccgtccaagatcatgatccgcgccgcccatatcgcccatctgcgccgggaaagcccgttcgatggcggcatcgccgctaccacgccgaccatccagcgcacggcgctgctggcccagcagcaggcccgcgtcgatgaactgcgccacgccaagtacgaaggcatcttggagggcaatccggcgatcactgtgctgcacggctccgcccgctttaaggacaatcgcaacctgatcgtgcaactcaacgacggcggcgagcgcgtggtggcattcgaccgctgcctgatcgccaccggcgcgagcccggccgtgccgccgattcccggcctgaaagacactccgtactggacttccactgaagcgctggtcagcgagacgattcctaagcgcctggccgtgattggctcatcagtggtggcgctggagctggcgcaggcgttcgcccgactcggagcgaaggtgacgatcctggctcgcagcacgctgttcttccgcgaagacccagctataggcgaagccgtcacggccgcattccgcatggagggcatcgaggtgagggaacacacccaggccagccaggtcgcgtatatcaatggtgaaggggacggcgaattcgtgctcaccacggcgcacggcgaactgcgcgccgacaagctgctggtcgccaccggccgcgcgcccaacacacgcaagctggcactggatgcgacgggcgtcacgctcaccccgcaaggcgctatcgtcatcgaccccggcatgcgtacaagcgtggaacacatctacgccgcaggcgactgcaccgaccagccgcagttcgtctatgtggcggcagcggccggcactcgcgccgcgatcaacatgaccggcggtgacgcggccctgaacctgaccgcgatgccggccgtggtgttcaccgacccgcaagtggcgaccgtaggctacagcgaggcggaagcgcaccatgacggcatcaaaactgatagtcgcacgctaacgctggacaacgtgccgcgcgcgctcgccaacttcgacacgcgcggcttcatcaaactggtggttgaagaaggcagcggacgactgatcggcgtgcaggcagtggccccggaagcgggcgaactgatccagacggccgcactggcgattcgcaaccggatgacggtgcaggaactggccgaccagttgttcccctacctgacgatggtcgaagggttgaagctcgcggcgcagaccttcaacaaggatgtgaagcagctttcctgctgcgccgggtga

SEQ ID NO: 413 - DNA, 351 bp, artificial
  Centroid sequence
atggtaaagaaaagtgaatttgaacggggagacattgtgctggttggctttgatccagcaagcggccatgaacagcaaggtgctggtcgacctgcgcttgtgctctccgttcaagcctttaatcaactgggaatgacgctggtggcccccattacgcagggtggaaattttgcccgttatgccggatttagcgttcctttacattgcgaagaaggcgatgtgcacggcgtggtgctggttaatcaggtgcggatgatggatctacgcgcccggctggcaaagcgtattggtctggctgcggatgaggtggtggaagaggcgttattacgcttgcaggcggtggtggaataa

SEQ ID NO: 414 - DNA, 252 bp, artificial
  Centroid sequence
atgcgtattaccataaaaagatgggggaacagttcaggtatggtcattcctaatgttgtgatgaaagaacttaacttacggccggggcagagcgtggaggcgcaagtgagcaacaatcaactgattctgacacccatctccaggcgctactcgcttgatgaactgctggcacagtgtgacatgaacgccacggaacttagcgagcaggatgtctggggtaaatccacccctgcgggtgacgaaatatggtaa

SEQ ID NO: 415 - DNA, 708 bp, artificial; identical to SEQ ID NO: 381
  Centroid sequence

SEQ ID NO: 416 - DNA, 966 bp, artificial
  Centroid sequence
atgaagcgtgcacctgtcattccaagacatacagcaaatactcaggcaactgaagacacgtcagcgccagctgcaccgatggtggattcgttaattgcacgtgtcggggctatggctcgcggcaatgcaattacgttaccggtgtgtggtcgggaagtgaagtttaccctggaggtgctccggggagatgttgttgaaaatgcttcccgggtatggtcaggtaacgagcgcgatcaggaactactgaccgaagatgccctggatgatctcattccttcatttttactgaccggccagcagactccggcttttggccgtcgggtttccgatatcattgaaattgcagatggcagccgtcgccgcaaggccgctatcctgacagaaagtgattatcgtattctggtcggtgaactggacgatgagcagatgtcagcattgtccagactgggtaacgattatcgtccgacgagtgcttatgagcgtggtcagcgttatgcaaatcgactgcagaatgagtttgccggaaatatttccgcacttgccgatgcggaaagcatctcacgtaagataattactcgctgtatcaacacagccagactgcctaaatccgttgtcgcccttttctctcatcccggtgaattgtctgcccggtcaggtgaagcccttcagaaagcttttgcagataaagaggaattactgaagcagcaggccgcgactctccacgatcagaagaaagcgggtgtcatctttgaagcagaagaggtcataagtcttttaacatcggtactgaaaaagtctcctgcatcaagagtgaatctgagctcacgtcatcagtttgctccgggggcaacagcattatacagaggcgataaagtggtcctgaaccttgacaggtcccggcttcctgccgaatgcattgagaagatcgaagccattctcaaggcgcttgaaaagcctaagtcctga

SEQ ID NO: 417 - DNA, 834 bp, artificial
  Centroid sequence
atgcagaacaatgagcagacggaatacaaaaccgtgcgcggcttaacccgcggtctaatgttattaaatatgttaaataaacttgacggcggtgccagcgtcgggctgctggcggaactcagcggcctgcatcgcaccactgtgcggcgactgctggagacgctgcaggaagagggatatgtccggcgtagtccctccgatgatagttttcgtctgaccatcaaagtgcggcaattaagcgaaggatttcgtgacgaacagtggatttctgcactggcggccccactgctgggcgatctgttgcgcgaagtggtatggccgacagatgtgtccacgctggatgttgatgcaatggtggtacgcgaaaccactcaccgtttcagccgcttatcctttcaccgggcaatggtcgggcggcgtttaccgcttctgaaaaccgcctcgggcctgacctggctggccttttgcccggaacaagaacgcaaggaattaatcgagatgttagcctcccgccccggtgatgactatcaactggcacgagaaccgttaaagctggaagccattctggcgcgcgcgcgcaaagagggttacggacagaactaccgcggctgggatcaggaggagaagatcgcctctatcgccgtaccgctgcgcagtgaacaacgggtgattggctgtctgaatctggtgtatatggcgagcgcaatgaccatcgaacaggcagcggaaaagcatcttccggcactacaacgggtagcaaaacagatcgaagaaggggttgaatcgcaggctattctggtggccggacggcgaagcggcgtgcatttacgctag

SEQ ID NO: 418 - DNA, 972 bp, artificial
  Centroid sequence
atgaagcgtgcgcctgtcattccaaaacatacgattaagactcaaccgcttgaagatactccgtcatcggcaccagctgcaccgatggtggattcgttaattgcgcgcgtaggagctatggctcgtggcaatgctattactttgcctgtatgtggtagggacgtgaaatttacccttgaggtgctccggggagatagtgttgagaagacctctcgggtatggtcaggtaatgaacgtgaccaggaactgcttaccgaagacgccctggatgatcttatcccttcttttctactgacaggtcagcagacaccagcattcggtcgaagagtgtctggggtcatagaaattgccgatgggagccgccgtcgtaaagctgctgcacttacagaaagtgattatcgagttctggttggtgagctggatgatgagcagatggctgcattgtccagattgggtaacgattataggccaacaagtgcttatgaacgtggtcagcgttatgcaagccgattgcagaatgaatttgctggaaatatttctgcgctggctgatgcagaaaatatttcacgtaagattattacccgctgtatcaacacagctaaactgcctaaatcagttgttgctcttttttctcatcccggtgaactatctgcccggtcaggtgatgcacttcaaagagcttttacagataaagaagaattacttaagcagcaggcatctaaccttcacgagcagaaaaaagcaggagtgatatttgaagctgaagaagtcatcactcttttaacgtctgtgcttaaaacgtcatctgcctcaagaactagcttaagctcacgacatcagtttgctcctggagcgacagtgttgtacaagggcgataaaatggtgttaaacctagatagatctcgtattccaactgagtgtatagagagaattgaagccattcttaaggaacttgaaaaagcggcactttga

SEQ ID NO: 419 - DNA, 1176 bp, artificial
  Centroid sequence
atgttcagtatgggactcatggatacactcaaccagtgcataagtgctggtcatgaaatgacgaaagcaatcgccattgcgcagtttaatgatgacagtccggaagcccggaaaataacccggcgctggaggattggtgaagcagctgatttagttggcgtgtcatctcaggctatcagggatgccgagaaagctggccggctgcctcaccctgatatggaaacccgtggaagagttgagcaacgcgttggttataccatcgagcaaatcaatcacatgcgggatgtatttggtacacgactgcgccgtgctgaagatgcgtttccgccggtgattggtgttgctgctcacaaaggtggtgtttacaaaacctccgtttctgttcacctggctcaggacctggccctgaaaggattacgcgttctgcttgtcgagggtaatgatcctcagggcacagcctcgatgtatcacggatgggtgcccgatcttcatatacacgcggaagatactctcctgcccttttatcttggtgaaaaggatgatgccagttatgcgataaaaccaacctgctggcctggccttgatatcattccgtcctgcctggcactgcatcgcattgaaactgaactgatgggcaaatttgatgaaggaaaactgcccaccgacccgcatctgatgctccgccttgctattgaaacggtcgctcatgactatgatgtgattgttatcgacagcgcaccgaacctcggtattggcacgatcaatgtcgtatgcgctgctgatgtgctgattgttcccaccccggcagagctgttcgattacacttctgcactgcagtttttcgatatgcttcgtgatctgctcaggaatgtggatcttaaaggctttgagccggatgtccgtattctccttaccaaatacagtaataacaatggttcgcagtcaccgtggatggaagaacaaattcgcgatgcatggggaagcatggttcttaaaaatgtggtacgtgaaaccgatgaagttggtaaaggccagatccgcatgagaaccgttttcgaacaggcgattgatcaacgttcttcgaccggcgcatggcgaaacgcactttcaatctgggaacctgtttgtaatgagatttttgatcgtctgattaaaccacgctgggagattagataa

SEQ ID NO: 420 - DNA, 1005 bp, artificial
  Centroid sequence
atgtatgccttcaaaactgaaaggccggacgcagcacgtcgttatcataataaattcgtcactggcactaactatcaggaagaatcaaacagacgctttgcattaagcgaacctactgaaaatatactgcgtacctcaattctggaatccgggtggcttattaaaaatattaccctacgtgatgttaacgccgtgtcaggtaatgccgtcaatattggtgccagtgaactgtataccggacgtgtggatggtggccgtttccacaaaaaaatggcaatcaatggtacggagttctttctgacagagacggatacctgcgcccggatcagctattccgatatgtctcatatttaccataccggcgtgccggatgagtttgagaaaacggttgagagcttttttgcccaggcatatgcgctggacatgctgcgggtcggtttcaacggtgtgtcgattgcaaatactacaaacccggaaatcaataaaaaaggcgaggatgtcaatattggctggcatgcactggcgaaagcctacgggaacggaaagcaaatcatctctgagcctgtcactctgggagagactggcacctggaaaaatattgatgctctggccaaccatctgattacagagcttattgctgagcagtttcgtgaagatcctcgtctggttgtactggttggggcagagctggcagcacatcaacgcctgaagttatttaatgccgcagaccgcccgtctgatgtgaatgcggcacagatggctacaagttctgttgctggccgctttgcgtttattcccccgtttatgccgggtaagcgtctggcagtaacgacgctggataatctgcatatttacactcaggcgataacacgctggtttcgtgctgagtttgatgatgaaagcagtgaatacgtgcattcctacctgcgcaatgaaggttatgcactcggtgaacctgaactgtacgcggctgttgatgagtgcaccctgacgtttgcggattga

SEQ ID NO: 421 - DNA, 945 bp, artificial
  Centroid sequence
atgcacgcttatcttcattgtctttcccactcgccgctggtggggtatgtcgacccggcacaagaggtactcgatgaggtcaatggcgtgattgccagcgcccgcgagcgtattgcggctttctcccctgaactggtggtgctgtttgcgccagatcactacaacggctttttctatgacgtgatgccaccgttctgtttaggcgttggagcgacggcaattggtgatttcggcagtgcggcaggagagctgcccgtgcctgtggagctggcggaggcctgtgcgcatgccgtcatgaagagcgggatcgatcttgccgtttcttactgtatgcaggtggaccacgggttcgcccagccgctggagttcctgctcggtgggctggataaggtgccagttctgcctgtgttcatcaacggtgtcgccacgccgctgcccggtttccagcgtacccgcatgttgggtgaagccattggacgtttcaccagcactctcaataaacgcgtgctgttcctaggttccggtgggctttcccatcagccgccggtgcccgaactggcgaaagccgatgcccatatgcgcgaccgcctgttggggagcgggaaagatttacccgccagtgagcgcgaattgcgtcagcaacgggtgattagcgccgctgagaagtttgttgaggatcagagaactctgcatccgctcaacccgatttgggataaccagttcatgactttgctggagcagggacgcatacaggaactggatgccgtcagtaacgaagagctttccgccattgccggaaagtcgacacatgaaatcaaaacctgggtcgccgcttttgccgctatttctgcatttggcaactggcgtagcgaagggcgttattaccgcccaatcccggagtggattgccggatttggctcgttaagcgccagaacagagaactga

SEQ ID NO: 422 - DNA, 1665 bp, artificial
  Centroid sequence
atgacaacaaaaaacccggatatccaacccgctgtgcagcataccgcgcaggtggcgattgccggtgctggtccggtagggctgatgatggccaactatcttgggcagatgggcattgaggtgttgatagtggagaagctcgacacgctgatcgactatcctcgcgccatcggcattgacgatgaagcgctgcgcactatgcagtctgtggggctggtcgagaacgttttgccgcacaccacgccgtggcacgcaatgcgctttctcaccccgaaaggccgctgttttgctgatatccagccgatgaccgacgaatttggctggtcgcgtcgtaatgcgtttattcagccgcaggtggacgcggtgatgttggaagggttgtcgcgttttcccaacgtgcgctgcctgttctcccgcgagctggaggccttcagccaacaaaacggcgaagtgacgctaaatctgaaagcgccagacggtcaacgtgaaacggtgaaggctcagtggctggtggcctgcgacggcggcggcagcaacgtcagacgctcgctgaacgtgccgtttgaaggtaaaaccgcgccgaatcagtggattgtggtggatatcgccaacgatccgctcagcacgccgcatgtgtatttatgctgcgatccggtgcgcccgtatgtctccgccgcgctgccgcacgcggtgcgccgttttgagtttatggttatgccgggggaaaccgaagcgcagcttagcgagccgcagaatatgcgccagttgctgagcaaagtgctgccgaacccggacaacgtcgagctgatccgccagcgcgtgtatacccataatgctcgtctggccgaacgttttcgtattgaccgcgtgctgctggcgggcgatgcggcgcacattatgccggtctggcagggtcagggatacaacagcggcatgcgcgatgctttcaatctggcatggaaactggcgctggtgattaacggtaaagccggcgatgcgctgttggatacctaccagcaggaacgccgcgaccacgccaaagcgatgatcgacctctccgtgaccgctggcaacgtactagcgccgcccaaacgctggcacggcgcggtacgcgacggggtttcctggctgctgaattatattccgccggttaaacgctacttccttgaaatgcgctttaagccgatgccgcagtaccacgccggggcgctggtgcgtgaaggcgacgcgaaaacttcaccggtcggcaagatgtttatccagccgaaggtgacgctggaatcgggcgaagtgacgttgctcgacaacgtcatcggaccgaatttcgcggtgattggctggggctgtaacccactatggggcatgagcgaggcgcagatccaacagtggcaggcgctggggacgcgttttatccaggtcgtgccggatacgcagatacataccgatcaggataaccacgacggcgttacccgcattggcgatacgcaaaaccgcctgcgcgcgtggtttgcccagcacaacgccgcgctggtagtaatgcgcccggaccgcttcgtggccgctatcgccattccgcaaaccctgggcagcaccctgaataaactggcgtcggtgatgacgctcactcgcgctactgccgacattcctgttgaaaaggttgcctga

SEQ ID NO: 423 - DNA, 1665 bp, artificial
  Centroid sequence
atggcaatacaacaccctgacatccagcctgctgttaaccatagcgttcaggtggcgatcgctggtgccggtccggtcgggctgatgatggcgaactatctcggccagatgggcattgacgtgctggtggtggagaaactcgataagttgatcgactacccgcgtgcgattggtattgatgacgaggcgctgcgcaccatgcagtcggtcggcctggtcgataatgttctgccgcatactacgccgtggcacgcgatgcgttttctcaccccgaagggccgctgttttgctgatattcagccaatgaccgatgaatttggctggccgcgccgtaacgcctttattcagccgcaggtcgatgcggtgatgctggaaggggtgtcgcgttttccgaatgtgcgctgcttgttttcccgcgagctggaggccttcagtcagcaagatgacgaagtgaccttgcacctgaaaacggcagaagggctgcgggaaatagtcaaagcccagtggctggtggcctgtgatggtggggcaagttttgtccgtcgcaccctgaatgtgccgtttgaaggtaaaactgcgccaaatcagtggattgtggtagatatcgccaacgatccgttaagtacgccgcatatctatttgtgttgcgatccggtgcgcccgtatgtttctgccgcgctacctcatgcggtacgtcgctttgaatttatggtgatgccgggagaaaccgaagaacagctgcgtgagccgcaaaatatgcgcaagctgttaagcaaagtgctgcctaatccggacaatgttgaattgattcgccagcgtgtctacacccacaacgcgcgactggcgcaacgtttccgtattgatcgcgtactgctggcgggcgatgccgcgcacatcatgccggtatggcaggggcagggctataacagtggtatgcgcgacgcctttaacctcgcatggaaactggcgttggttatccaggggaaagcccgcgatgcgctgctcgatacctatcaacaagaacgtcgcgatcacgccaaagcgatgattgacctgtccgtgacggcgggcaacgtgctggctccgccgaaacgctggcagggtacgttacgtgacggcgtttcctggctgctgaattatctgccgccagtaaaacgctacttcctcgaaatgcgcttcaagccgatgccgcaatattacggcggtgcgctggtgcgtgagggcgaagcgaagcactctccggtcggcaagatgtttattcagccgaaagtcacgctggaaaacggcgacgtgacgctgctcgataacgcgatcggcgcgaacttcgcggtaattggctggggatgcaatccactgtgggggatgagcgacgagcaaatccagcagtggcgcgcgttgagcacacgcttcattcaggtggtgccggaagtgcaaattcataccgcacaggataaccacgacggcgtactacgcgtgggggatacgcaaggtcgcctgcgtagctggttcgcgcaacacaatgcttcgctggtggtgatgcgcccggatcgctttgttgccgccaccgccattccgcaaacactgggcaagaccctgaataaactggcgtcggtgatgacgctgacccgccctgatgccgacgtttctgtcgaaaaggtagcctga

SEQ ID NO: 424 - DNA, 945 bp, artificial
  Centroid sequence
atgcacgcttatcttcactgtctttcccactcgccgctggtgggctatgtcgacccggcgcaggccgtgctcgacgaggtcaacggcgtgattgccagcgcccgcgcgcgcattgcggcgttcgagcccgaactggtggtgctgtttgcgcccgatcactacaacgggtttttctacgacgtgatgccgccgttctgtttaggcgtgggagccacggcgatcggcgatttcggcagcgcggcgggggagctgccggtgccgacagatctcgccgaagcctgcgcccacgcggtgatgaaaagcggcatcgatctcgccgtgtcctacaacatgcaggtcgatcacggctttgcgcagccgctggagtttttgctcggcgggctggataaggtgcctgtgctgccggtgtttattaatggcgtcgccacgccgctgccgggctttcagcgtacccgcatgctcggggaagccattggccgttttgccagttcgctgaataagcgcgtgctgtttttgggctccggcggcctgtcgcatcagccgccggtaccggagctggcgaaagccgatgcccatatgcgcgaccgcctgctcggcagcgggaagcaattacccgaaaacgagcgggagctgcgccagcagcgggtgatcagcgccgccgagaagtttgtgcaagaccagcactcgctgcacccgcttaaccccgtctgggataaccgctttatgaccctgcttgagcaggggcgtttgcaggaactggacgccgtcagtaacgaagagttgtccgcgatggcgggcaaatcaacgcacgaagtgaaaacctgggttgccgccttcgccgccatttctgcctttggcaactggcgtagtgaaggccgttattaccgcccgatcccggagtggatcgccggattcggctccctgagcgccaccacacagaactga

SEQ ID NO: 425 - DNA, 945 bp, artificial
  Centroid sequence
ttgcgggttacgcgcatgagcaggacagcgttgcgtcaggtcgtgccggtggtgcaaaccaccgtgttcgatgcgtatattgtcggtctggccccctcgggacggcgaggtatcaccagcctgttaaaccgcagcgccagcatacttaaacacggtgcggatgcagcagactatccgtgggaacaacttaactacgccgccgttgccaaagtgcgcgcggcactgctggatgacggttacgccgtgtcatcggtcaacatggcgctgtcagcactccggggcgtagcgcagacggcctttaacctcaattacatggatgccgaaacgctggcacgtatccggtcagttaagcgcgtgagcggcgatgtccagcgcaagggaagggcgctgggcaggcaggaaatccgggtactgattcaggctgcaaaacagcatccgcaatctgtacgacgctgtcgcgatgtcgccattgtgctgatgctttgcggaacgggcctgcgggccggggaactggttaaacttgagcgccgggactatgacaacggcatcctgacggtgaggcaagggaaggggcgtaaataccgtgaaattcacgtggcggatgcggtggacaaggctattcgtgcgtggctgaaagttggcgcagacgaggctgacagtgcgttgtttaggcgaattcagcgcagtggtaaggtcgcaagccaaccgctgactacgaccgggttaacgggtatcctggctgagttacagcaaacggcaggtatagcacgttttaccccgcatgatatgcggcgcaccttcatcacccgtttgctggagcagggcgtggatatcaataccgtccgccagttggcaggccacagcgacatatccacgacgacgcgctatgactgtcgtggtgatactatgaagatcagtgccagcaagcgcatcagatgtttttag

SEQ ID NO: 426 - DNA, 951 bp, artificial
  Centroid sequence
atgagtaagcgtaaagtcgccattatcggttctggcaacattggcaccgatctgatgattaaaattttgcgtcacgatcagcatctggagatggcggtgatggtcggcattgatcctcagtccgacggtctggcgcgtgccagacgtatgggcgtcgccaccacccatgaaggggtgatcgggctgatgaacatgcctgaatttgctgatatcgacattgtatttgatgcgaccagcgccggtgctcatgtgaaaaacgatgcggctttgcgcgaagcgaaaccggatattcgcttaattgacctgacgcctgctgccatcggcccttactgcgtgccggtggttaacctcgaggagaacgtcgatcaactgaacgtcaacatggtcacctgcggcggccaggccaccattccaatggtggcggcagtttcacgcgtggtgcgtgttcattacgccgaaattatcgcttctatcgccagtaaatctgccggacctggcacgcgtgccaatatcgatgaatttacggaaaccacttcgcgagccattgaagtggtgggcggcgcggcaaaagggaaggcgattatcgtgcttaacccagcagagccaccgttgatgatgcgtgacacggtgtatgtattgagcgacgaagcttcacaagatgatatcgaagcctcaatcaatgaaatggctgaggcggtgcaggcttacgtaccgggatatcgcctgaaacagcgcgtgcagtttgaagttatcccgcaggataaaccggttaatttgccgggcgtagggcagttctccgggctgaaaacggcggtctggctggaagtcgaaggcgcagcgcattatctgcctgcctatgcgggcaacctcgacattatgacttccagtgcgctggcgacagcagaaaaaatggcccagtcactggcgcgcaaggcaggagaagcggcatga

SEQ ID NO: 427 - DNA, 816 bp, artificial
  Centroid sequence
atggtcatgacgaagcatactcttgagcaactggcggcggatttacgccgcgccgcagagcagggcgaagcgattgcgccgctgcgcgatctgattggtatcgatcacgctgaagcggcctacgccattcagcacataaatgtgcaatatgacgttgtgcaggggcgtcgcgtggtagggcgtaaagtgggcctgacgcatccgaaagtgcaacaacaactgggcgttgatcaaccggattttgggacgttatttgccgacatgtgttatggcgataacgaaatcattcctttttcccgtgttctgcaaccccgcattgaagcggagatcgcactggtgttgaaccgcgatttacccgcaactgatatcaccttcgacgaactgtataacgccattgaatgggtacttccggcgctggaagtggtggggagccgcattcgcgactggtcgattcagtttgtcgataccgtggcagataacgcttcctgcggggtgtatgtcatcggcggtccggcgcaacgtccggcggggttagacctgaaaaactgcgccatgaagatgacgcgtaataacgaagaggtttccagcgggcgcggcagcgaatgcctgggacatccgcttaatgccgccgtctggctggcacgcaaaatggccagtctgggtgaaccgctgcgcgccggagatatcattcttaccggggcattaggcccgatggtggcggtgaatgcgggcgatcgttttgaagcccatattgaaggcataggttcagttgctgcgacattttcaagcgcagccccaaaaggaagtctgtcatga

SEQ ID NO: 428 - DNA, 882 bp, artificial
  Centroid sequence
atgcaggagaagaagatgacttaccaaccgcaaaccgaagccgccaccagccgttttctggaggtgcaggaggcaggcgaaaccctgcgcgtacatttcaatgactgtgggcagggcgaagagaccgttgtgctgctgcacggctccggtcctggcgcgacgggctgggcaaacttcagccgcaacatcgatccgctggtggaagccggataccgggtgatcctgctggattgtccgggttggggaaaaagcgatgggatcgttaaccgcggttcgcgatccgaccttaacgcccgcatcctcaaaagcgtggtcgatcggctggatattcagaaaatccacctgctgggcaactcgatgggcggccacagtgcagtggcgttcaccctgagctggccggagcgcgtgggcaagctggtgctgatgggcggcgggacgggcggcatgagcctgtttactccaatgccgaccgaaggcatcaagcgcctgaatcagctgtaccgcgaaccgactatcgagaacctgaagctgatgatggagatcttcgtcttcgacaccagtgacctgaccgaggcgctgtttgaggcgcgtctgaacaacatgctgtcgcgtcgcgatcacctggaaaactttgtccagagcctggaagccaacccgaaacagttcccggacttcagcccgcgcctgggggaaatcaaagcccagaccctgattgtctgggggcgtaacgaccgctttgtaccgatggacgccggtctgcgtctgctctccgggattaccggttccgagctgcacatctatcgcgactgcgggcactgggcgcaatgggaacatgcggatgcctttaaccagctggtgctgaacttcctcgcgcgtccttaa

SEQ ID NO: 429 - DNA, 1014 bp, artificial
  Centroid sequence
atgaacggtaaaaaactctatatctctgacgtgaccctgcgcgacggtatgcacgctattcgtcatcaatattcgctggagaatgtgcgccagatagccaaagcgctggacgacgcacgggttgattctattgaagtggcccacggcgacggtttacaaggttccagcttcaactacggctttggtgcacacagcgacctggagtggattgaagcggcggcggacgtggtgaagcatgccaaaattgccacgctgttgctgccgggtatcggcactattcatgacctgaaaaatgcatatcaggccggcgcacgggtagtgcgcgtggcgacccactgcactgaagcggatgtgtcggcccagcatattcagtatgcgcgtgagcttggcatggataccgtcggttttctgatgatgagccatatgaccacaccggagaacctggcacagcaggcgaagctgatggaaaactacggcgcgacctgtatttatgtggtcgattccggcggcgcaatgaacatgagcgatattcgcgcccgcttccgcgcactgaaagcggtgctgaagcctgaaacagaaaccggaatgcatgcgcatcacaacctgagtcttggggtggcgaactcgattgccgcagtagaagaggggtgtgaccgtgtcgacgccagcctggcagggatgggcgcaggcgcgggcaacgcaccattggaggtatttatcgccgctgcggataagcttggttggcagcacggaaccgatctctacgcactgatggacgccgccgacgatttagtgcgtccactacaagaccgcccggtgcgggtggatcgtgaaacgctggcgctgggctatgccggggtgtactccagttttctgcgtcattgcgaagtggcggcagcacgttatggcctgagcgcagtagatattctggtggaactgggcaaacgtcggatggtgggcggccaggaagatatgatcgtcgacgtagcgctggacctgcgcaaccgcaaataa

SEQ ID NO: 430 - DNA, 1014 bp, artificial
  Centroid sequence
atgaacggtaaaaaactttatatctcggacgtcacattgcgtgacggtatgcacgccattcgtcatcagtattcgctggaaaacgttcgccagattgccaaagcactggacgatgcccgcgtggattcgattgaagtggcccacggcgacggtttgcaaggttccagctttaactatggtttcggcgcacatagcgaccttgaatggattgaagcggcggcggatgtggtgaagcacgccaaaatcgcgacgttgttgctgccaggaatcggcactattcacgatctgaaaaatgcctggcaggctggcgcgcgggtggttcgtgtggcaacgcactgtaccgaagctgatgtttccgcccagcatattcagtatgcccgcgagctcggaatggacaccgttggttttctgatgatgagccatatgaccacgccggagaatctcgccaagcaggcaaagctgatggaaggctacggtgcgacctgtatttatgtggtggattctggcggtgcgatgaacatgagcgatatccgtgaccgtttccgcgccctgaaagcagagctgaaaccagaaacgcaaactggcatgcacgctcaccataacctgagtcttggcgtggcgaactctatcgcggcggtggaagagggctgcgaccgaatcgacgccagcctcgcgggaatgggcgcgggcgcaggtaacgcaccgctggaagtgtttattgccgccgcggataaactgggctggcagcatgggaccgatctctatgcgttaatggatgccgccgacgacctggtgcgtccgttgcaggatcgaccggtacgagtcgatcgcgaaacgctggcgctgggatacgctggtgtttactcgagcttcctgcgtcactgtgaaacggcggcggcgcgttatggcttaagtgcggtggatattctcgttgagctgggcaaacgccggatggttggcggccaggaggatatgatcgttgacgtggcgctggatctgcgcaacaacaaataa

SEQ ID NO: 431 - DNA, 435 bp, artificial
  Centroid sequence
atggaaaataatttggaaaacctgaccattggcgtttttgccaaggcggccggggtcaacgtggagacaatccgcttctatcagcgcaagggcctgttgcgggaaccggacaagccttacggcagcatccgccgctatggggaggcggacgtggttcgggtgaaattcgtgaaatcggcacagcggctggggttcagtctggacgagattgccgagctgttgcggctcgacgatggcacccactgcgaggaggccagcagcctggccgaacacaagctcaaggacgtgcgcgagaagatggccgacttggcgcgcatggaaaccgtgctgtctgaactcgtgtgcgcctgccatgcacgaaaggggaatgtttcctgcccgttgatcgcgtcactacagggcgaagcaggcctggcaaggtcagctatgccttag

SEQ ID NO: 432 - DNA, 1230 bp, artificial
  Centroid sequence
ttgcgtataacattgtgtataactgagttcgatcttttttctatacacatgctgctatctgacatccaaataaaacgagcaaaaccgaaggacaaaccctatacacttaacgatggtatgggactatcactcctcatcgacaccacgggcagcaaaggctggcgtttccgctatcgctttgcaggtaaacctaagatgatctccttcggcgtttatggcgatgtgtcattggcacaagcacgtgctaaacgtgatgaggcgcgttcgatgttagctaaagggatcaacccaagtgaagccagaaaagcgaataaaatagctttacagttcgcgcatgagaacagctttgagtctgtggccagagaatggcactcatcgaaaaaaaccacctggtcagaggggtatgcaaaagaggttctcaactgcatggaaagggatattttccctttcatcggacaacgcccaattgagcagattgaaccactagagctgctcaccgtcctgcaaaaaattgagaaaagaggtgcgctagagcaaaccagcaagatccgccgccgctgcggtgaagtgcttcgttatgctgttgccacaggtagagcaaaatataattttgcacccgatttagctatcgcactcaacaaacctaaaactcaacacttcccgttcctgactgaaagcgagttgcccgagttcgtcaatgctctggataactatcagggcagtttagtcaccaaatacgccacccagctattgatgctaacaggcgtgcgaacaattgaactacgcgcagcggaatgggctgagtttgatttagataatgccttatgggagatccccaaagaacggatgaagaaacgccgcccccatctggttccgttatctactcaggcgatcagcatcctgaaaaagctgcaagaaataactgggaactacagcctcgttttccctggacgaaatgacgtaaggaagccaatgagtgaagccagtataaacaaagtgataaaactactgggctatcatggtcggttaacgggccatggcttcaggcataccatgagtactattttgcatgagcttggttttgaaagcgcttggattgagatgcaacttgcgcatgttgataaaaactctattcgaggaacttacaatcatgcgcaatatttagaaaatcgaagaaaaatgatgcaaatttatagtgacatgttgctaaatgagttccctattaaatag

SEQ ID NO: 433 - DNA, 381 bp, artificial
  Centroid sequence
atgcgtgatattcagcaggttcttgagcgctggggcgcgtgggtggctaataatcatgaggatgtgacctggtcgtccattgctgccggttttaagggattaatcccttcaaaagtaaaatcccgcccgcaatgctgtgacgatgacgcgatggttatatgtgggtgtatggcccgccttaaccggaacaacaacgatctacatgacttgctggttgactactacgtgtttgggatgacattcatgacgctggcgcggaagcatggatgctcagatggttatataggaaagaagctacaaaaagccgagggggtggtggaaggaatgttgatgatgttgggtgtccggttagaaatggacaaatatattgaacatccctga

SEQ ID NO: 434 - DNA, 636 bp, artificial
  Centroid sequence
ggcatggcacgcatctgcctttacggggatttacaacgatttggccgccgcatcgaccttcgagtgaaaacggggtccgaagccatccgggcgctggccatgcagatcccggcgtttcgtcagaaactgagcgacggctggtatcaggtgcgtattgccggacaggatgtcagcacgtccggattaacggcgcagttacatgaggctctgcctgacggcgctgtgattcatattgttcccagagtcgccggggccaagtcaggtggtgtattccagattgtcctgggagctgccgccattgccggatcattctttaccgccggagccacccttgcagcatggggggctgccattggtgccggtggtatgaccggcattctgttttctctcggtgccagtatggtgctcggcggtgtggctcagatgctggcaccgaaagccaggacgcccacggcagccagtacagataacggcaaacagaacacgtatttctcgtcactggataacatggttgcccagggtaatgttctgcctgttctgtacggggaaatgcgcgtggggtcacgtgtggtttctcaggagatcagcacggcagacgaaggggatggtggtcaggttgtggtgattggtcgctga

SEQ ID NO: 435 - DNA, 462 bp, artificial
  Centroid sequence
gtgagccagcaagccaacgacaacagcgagagccgcttcatgggactgatgacacgcattgccgataaaaccggcgcgctcggcagcgtcgtttccgcgatgggctgcgccgcctgctttccagccctcgccagcttcggcgcggccatcgggctgggcttcttgagccagtacgagggactgttcatcagccgcctgctgccgctgtttgccgcgctggccttcctggcgaacgcgctgggttggttcagtcatcggcaatggctgcgcagtctgctcggcatgatcggcccggccatcgtgtttgcggccacggtctggctgctcggcaactggtggacggcgaacctgatgtacgtcggcctggccttgatgattggggtgtcgatctgggacttcgtgtcgccggcgcatcgccgttgcggaccggacggctgcgaactccccgccaagcgcttgtga

SEQ ID NO: 436 - DNA, 183 bp, artificial
  Centroid sequence
gtgttggcttacacttgcgggccacggaatgatgagacctgtcgggaactgttagccctgttgactccgttctgtatcggcatggtgaccagcgatgactggggcagctacgccagagaagtgccggaggagaaacacctgaccggcaaaatcttcacgcaacgtatgaacgtaacaacctga

SEQ ID NO: 437 - DNA, 273 bp, artificial
  Centroid sequence
atggctaccgttactgttcattgtccgcgctgtcattccgatgaagtttatcgacatggccgtagttgttcccggcatgagcgtttccgttgtcgctcatgtaaacgtgttttccagctcacttactcttatgaagccagaaaacccggcgttaaggagcagatcgttgaaatggcacataacggcgcagggagctgttataccgccagaacactgaaaaccggcatcaataccgtcatacggacattaaaaagctctcgccccggcggataa

SEQ ID NO: 438 - DNA, 942 bp, artificial
  Centroid sequence
atgcgtattgaaaataaaatggttgattccggcaaaagttatggtgggcataaactctttaagacatctgtcccaggcctgtattacacattagcaatatcaaacatttggtcagcatatacatccactgatatcaacccatcaggcatgtatattggcgattctacagaacaatattttaactggcgtggcgaaagcgagcaaacactatattggtcttgcaacaacgcgaacaccacccaaaaatattgggccgttggtggcgttatgcaaacgctcacgattgaattttataccgataccgactttaacccgacaacgaaccaacgggtaacattatccagaacagataattatctctactcattcaaaggatatggtgttggcattggtatcaacgaacacagctattttcttagggttgactttgacctgaccgatatcgtattaacaaaccctacctgttttactgcggcgcttagtggcccaacggtaagtggttcaacggttaaaatgggtgattatagccctgggcaaataaaaaatggcgcaacagcggttccttttgatatcacgctacagaactgtattcgtgttcgcaatatagaaacaaaactcatgtcaaacaaggtgggtagtgtaagcaaagaacttctggctaacacactcacaggaaataatgcagcaaaaggcgttggtgtactgattgaaggtttaaaaaacactaaaagtgcacaaatggtactaaaaccaaatgattcaacgtctatttataaagattatgaaacagaaaatgacactaccggagggattttcccggatcaaggcaacgggacatcacaacctcttcacttccaggcaacattaaagcaagacgggaatattgctatcgaacccggcgaatttaaagccaccagtactttccaggtaacctatccctga

SEQ ID NO: 439 - DNA, 618 bp, artificial
  Centroid sequence
atggagcagtacatctggttaattgatgacgatgcggcaatacgcgattcattaagtctgctgctctcaaccgttggctggcagacgcaggcgtttgatagcgcacacgcttttcaacatcaggcagggaatctagccgaattaaccggctgtatgctgctggatatccgcatgccggggaaaaccgggctgacgctgctcgatgagtggcgccagctaggtctaaccttgccggttattattatgaccgggcacggtaatattgatttatgtcgtcgcgccttcaaaaatggcgcctttgaatttttaaccaaacccattgatgccgacctgttattcgaagtggtcggcgaagcgatggcgcagcaaaaagcgcatcttgaacgacaacaaatattactgccgctgcaggaaaaactcgccacccttaccgcccgtgagcatgaaatgctccagcagctgcttcagggctactccagtaaagaaatcgcccgtttatgctcgctatcgccgcgtaccgtcgaagcgcatcgcgccaatatttttagcaaacttgaagttaactcgctgcccaaattgttgaagatttacgctgatgtcgccagtggttctaagtaa

SEQ ID NO: 440 - DNA, 1320 bp, artificial
  Centroid sequence
atgataaaaatcctctactggctcatcctcacactgctaagcgcaacggggcttggcgcctggtttcttcaacagcaatatgacgcgcgctccgccgacttccgcatcctgtatcgcgaaatcacagtaaaagtgtcgcagcacgatgccatcatccccctgcttccgtccggtcaaaacgccgccgaagtccagcagatcctgccgcagattgtgcaatggcggcgctatgattccctggagccacgacgccccatcgtcgcgcaaagccccgcacgctactggctgaatcttccgggcatctccctgctgattgatttgaacaccctacttaacagtctcaatgagaaaaagacattcaaacatcttgccattcgttgggacggtaccacgttgtttgaggacggtaccgcatctgccaacacctggtggcgctgggagaaaactgttgccagcccaacacaaccgctgttcattagcgcaggtgataacccgcaatggcatcaactgccgtggtggctgatactttcaccggcactgttctgggcggtgattatctatcttgttaatcagtatcgaaccaataaacgccgacgggatatcgccgatctacgcacccgctatggcgaactgactcgccttaacaccatgggcgagctggccgctggtatcgtgcatgagcttaatcaacctttaaccgccattatgagctataaccaggcggcagtgcgcctgattaaaaaaaacgatcccgtaaagatccccgaactgcttgaggcctcagtgttgcagataaaacgcattgacgccctgctcagccagtttcgtctcaagctaaccagcaagcgcgccgaatatcagccggttgacctaccgtcgctgtggctacgcgtgtgcgaattactggataatgagatccgcgccggtaaagttcgtatctccagccattttccgtcggacctacccgcgcttcctgcgccgccgctgtgggtagagcaaatactgcataatatcgttagcaatgccattcaggcacaaagcataaatgttccaggtagtgcgtggattcatctgcaagccgtgcgggtaaataacggtatcgctttaactcttactgatggcggaccagggttatcatctgaagcgctggagcaggtttttataccgttttataccacccgtactgatggtgtgggactcggcatggcccttgcggatacccttgttcagcgtcttaatggcaagatagaagcgagcaatatcaccggacaaggcgcttgcttccggttatggtttccgctgcgcaatgaggagaagtaa

SEQ ID NO: 441 - DNA, 2631 bp, artificial
  Centroid sequence
atggaaaacccagccatcctgttacgccgtttaaacccttactgcgcccgcgccctggaaggcgccgcttcgctgtgtcaggcccgcgcgcatgcgcaaatccttccagaacactggctgctaaaactactggagcagggcgagggagacctgaccgttttagcgcggcgttatgagtgggatatggacgctatctggcaggatctgctctcttttctggaaacgcttccacgttcggtacacagccggccgcagctgtccggcagcatccagagcctgatgcaggaggcgtggctgcgggcttcactggcgggggagacctctctacgcagtgttcatctactgatggcgttagtcagcaacccaacgcgggtgcgctgtgacagtctgtggccgctgttaacgttgggacaagcgcagcttgaacacctgcgaccattattagatatgcagtctgatgagcgcccggaattacagccagatgagcctggccacgctggcgatgtggagtttgtcggccgccccgtggaatcggccgtgaagtccgctgagatgaacccagcattacagaacgcgctggataaatttacccttgatatcactgctcgtgcccgtgaaggcaaaatcgacccggtttttggtcgcgataacgaaattcgtcaaatggtggatatcctgtcgcgcagaagaaaaaacaacccaatcctggttggcgaacccggtgtcggcaaaaccgcgctggtcgaagggctggcgttgcgtatcgcggagggcaacgtgccggacagtctgaagccggtttcattgcgtacgttggatctcggcttactgcaggccggcgcaggcgtcaaaggggaattcgaacagcggcttaagaacattatcgaagcggtacagcagtcgcctgtcccggtgctgctgtttatcgatgaagctcatactatcatcggcgcaggcaaccaggccggtggcgcggatgccgctaatttgctcaaaccggccctggcgcgcggcgaactgcgaactatcgccgccacgacctggagtgagtataagcagtacttcgagcgtgatgccgcgctggagcgccgcttccagatggtcaaagtcgacgaaccggacgatgacaccgcctgtctgatgctgcgcgggctgaaatctcgctatgctcatcatcacggggtacatatcaccgatgaagccattcgcgccgccgtgacactttcccgacgctatctcaccggtcgccagttgccagataaagcggtggacctactggataccgcatcggcccgcattcgcatgggaatcgatacggtgccggaattgttgacgcgtatgaaagcgcaaatcacggcgctggaaatggaaaaacaggcgctactggaagatgccatggtcggtagcggtagcgacgaagcgcggctggcggcaattgagctggaagaatcgcgtatgattttacagcttgatgacctggaaacgcagtacggcctggaacttaagctgaccgagcaactgctgagctgccgagccgatccttcccgccgcaaggagatcggtgaattacagagccaacttgccagcgtccagaataaccatccgctgctggggctggatgtcgatttacgtaccgtagcaacggtgattgccgactggaccggggtaccgctctctccattgctgaaggacgagcagacggaactgctgagtctcgaatctaatctggataaacgagtggtggggcaggatatggcgctaaacgccattgcccagagactgcgggcgaccaaaaccgggcttgcaccggataacggcccgcagggcgtatttctgcttgtcggtccgagcggtactggaaaaacggaaaccgcgctggcgctggctgatgaactgttcggtggtgaaagatcgctgattaccatcaatctttccgaatatcaggagccgcatacggtgtcccaactgaaaggatcgcctcccggttatgtcggctacggtcagggggggattctcaccgaagcggtacgcaaacgtccgtacagcgtggtcctgcttgatgaagtggaaaaagcgcatcgcgatgtgatgaatttattctaccaggtgttcgaccgtggctttatgcgcgatggcgaaggacgcgaaatcgacttccgtaatacggtgatcctgatgacctcaaacctcggcagcgatcggctgatgcagatgctgaaggaacatccggaagcgacagaatccgatttacatgacctgttgcggccggtgctgcgagaacattttcaaccagcgctgctcgcgcgtttccagaccattatttaccggccgctcagccagccggcgatgcgcaaaattgtcaacatgaaactcaaccaggtcagccagcgtttgtatcgtcattacggtatgacaaccgatattgccgaaggcctgtacgatgcgttgacggacgcctgcctgctgccggataccggcgcgcgtaacattgacagcctgcttaatcaacaaattctaccagtgctgagtcagcaactgttgagccatctggcggcagggctgaagccgcagagcctttctctggatgtcgatgaagaaggcggcgtggtcatggaatttagccactcctga

SEQ ID NO: 442 - DNA, 1341 bp, artificial
  Centroid sequence
atgacaacatatcctaagcgtcacctgactaccggcggcgatccgcgcacgctggcagactacgcaaagctgcgtgaagaaatgcataaactcagccacccggcgcgccccgacgttgactggctgtacgcagaacggctttgtctgtcgctgtttgaccgtaacggcgtagagctgcagactgcggcctggtatacgcttgcccgtacgcagttaaccggtttatccgggctgaatgaaggcctggctatcctggaaacgctgattacccgtcagtgggggagcctttggccacagccggtacacgcgcggatggaaatcctcagcggtttgggtaaacggctacagcaagcgctgcgtacgctgacgctgacctatgccgatcttagtttgatttatgaggcggaagcgcatctgaaagcgctggatgctgcgctgcagcgtctggaattaaagcatgccagtcagtttgatgcgttgctcaatttgatgcataacgcggcggtacggctggagaacagcgatggcgtaactagcgctgataccctaccgcacgtagtcgcgatggagaatgcttccacccatttggatgagcgggttgagcgaacgaagtggatttatattgcgccgccggaaacgctgccacacgtgcaagccggcaatgagcgtcagaattctgaaaaacgatggcgaccttttgtggccggtatgctgacgatgctggcgctggccgcagcggcgggatgggggtggcaggcgatggctaaaccagagccggaacagcggcaattcgctctcagtctggcgccattgccgacggtactttcgccagatcagttacgctccttttctcagcacgcaccgccagcagacgatgggataaagcagacccggcagcagctgtcagatctggcccaactcaagccgaattgggccatcgactatagcgagcaactggtacaacaggcacaagtgctatggccggagcaggcgaaagcattgtcctcgcagtggcggcagcagatcatagccgccgcgctgccggcggaaaacctcaccggctggtatcagggaatgctgcaactgcagcaattaactcagcgtctggatgccctggatgaacagaaggggaaatacatgacggttagtgaactcaaatctgcggtgttcgccattactcagtcttttaatcgaaccgtcccggctgaagaacagttacgtcaactatcagcgatgacagaaggacaaatcagccgcgctgcgcagcaacaacaggcggaacaacacctgcagcagctgatagtctcttatgcgctactgaaaagtaaaatggcggaatag

SEQ ID NO: 443 - DNA, 1359 bp, artificial
  Centroid sequence
atgactacctctaccctgcaacacaatgataataaagccgttgaagtagaaaaccgggtgatcaaaaagctgttccgccgcctgatcaccttcctgtttgttctctttgttttctcatttttggatcgcattaatatcggcttcgccggcctgacgatgggtaaagatctcggcctgacctccaccatgttcggcctggcggcgacgctgttctatgtcacctacgtgctgtgcgggatccccagcaatatcatgctggcgaaagttggcgcgcgccgctggatcgccgggatcatggtggtctgggggatcgcctcgacctgcaccatgttcgccaccagcccgcatacgctgtacatcctgcggatgctggtcggcatcgccgaagccggttttctgccggggatcctcgtctatctgacctggtggttcccggcctatcatcgcgcccgcgccaacgccctgtttatgatcgccatgccggtgaccatgatgctcggctcgatactttccggctatatcctggcgctcgacggcctgtggaacctgaaaggctggcagtggctgtttctgctggaaggcctgccgtcggtggtgctcggcgtcgtcacctggttcttcctcaacgacacgccggataaagccaactggctggacaacgaagagaaacaggcgctgaaggcgatgatcgatcgcgaacgggaacatgcggcgatcgtcccggcttcgccgcgttccacgctgcgcgaagtactgacgccagcggtgctgatgtataccctcgcctacttctgcctgaccaataccctcagcgccattaatatctggacgccgcagatcctgcagagcttcaacaccggcagtagcaacatcatgattggcctgctggcggcgatcccgcagttctgcaccattttcggcatgatctggtggagccgccgctccgaccggcgcaaagagcgcaagatgcataccatcctgccctacctgttcgccgcggcgggttggctgctggcttcggcaacgcaccacagcctgatccaactgatcggcattattatggcttcggtgggatcctttaccgcgatggccattttctggaccaccccggatcgggtgatcagcctgcaatcgcgcgcggtggcgctggcggtgatcaacgccatcggcaacgtcggctctgccgtcagcccgctgttgatcggcattttgcgcgataccaccggcagctttagctccgggctgtggtttgtcgccgggctgctgatcgtcggcgcgctggtgctcacccgcattccgatgagccagcgcgaggacgccgccgccgcgccgggcttagcggcgcaaaaaggccactaa

SEQ ID NO: 444 - DNA, 2511 bp, artificial
  Centroid sequence
atgacagaacaaactaaaataattcaattgcaggatacgttaaaccgttatttgctttactttccgcgaagcaaaagtacggctgtcgatgtgcattcttttataggcgaagagacgctcagtaagccgtatcgttataccatccgtttttccagtgtcgatgacaatgtttcggctggagctgttctcaatcagatcgcgcagttttatcttcgggcgcctaatccgaacgcgcgttggcagaacgaggcagcctgggtgccggtacgtcagattaacggcgttataacacaatttacccgcctgaagtcgtcctcagatgaggcgctatatgagtgcgtgctggagcatgagcttgcgctgctggataaaaattatcgctcagcggtgtatacggatgtcaccgtgccggaagtggttacgcaactcatgaaaaatagcggctacttcaaagggtataatatcgatttcgacaggctgagttacacctaccctcgaagggaaatgattattcagtggaaagaaacggatctgcagtttattcgtcggctgttggctgaaattggcatctggtttcgttttgagaatcaccataaggttcagacggaaaccgtggtgatttttgctgactctgacagtcgatacatttaccgcgataaaaaactcccctacgtccgctattccgggatgaccagctatgacgagtatgtgaccgatctggaagagcagcactcgctgattcctgaacaggtattagtacgcacctacaactatcgcgatccgtattctccacaagctattaaaaccattatcaataatgatatcccggaggggattacgtccgggggagagtatcactacgccgatcattacctcgcagacggcgattttcacgcaacagaagctgagacggccacattttacgcccgcctacgctatgaacgtctactgaatgagcagacccggctcagtgcaacaaccagcgatccggcgctgcggcctggcgttatgtttcaccttactgggccggtaccagacggcttcaaaccgggttttttgattaccaccatgacgattacgggtagtcgagcccgacattaccacgcgcagctcgccggcattccgtatctgtcaggatacaactttcgaccagagtatctgtcgcgacctgtcattgccggtacggtgcccgcgcgggtggcctctatcggaagggataaaacgtatgccggggtggatgccagggggcgttactgcgtgaagtttgattttgatctcaatgaaaaacgcagcggctttgaaagcgcactcgtccggctgggcaggccgtacgccggcgacacttacggttttcattttccgttgctggatgggacggaagttgccattgcctttgaaggtggcgacccggacaggcctttcattgcgcatgtgatgcatgacggcgctcgccccgatctggtcacaaaccgtaatgatacccgcaatattatccgcacggcagcgctgaacaaaatccgtctggaggaccgccggggtaaggagcatatcaagatttcgacggagcacggcaaggggcaactcaatctgggccaccttgtcgatgcggaaggaaaaaaacgcggggaagggctggaggcccgtaccgatgactggatggctttgcgtgcggcaaagggggtgatgatcaccacgcaagcgcagccgcgggcccaggggcagcagttggatatgaccgccgcgattacgcaactggaaaaagcgctctcgctggcaatgacattgcaacaaagcgcactgacggccggcgccagtaatgtggataccgatcggcaaaatacgctcggccagacgctgaatagactcagcggtgcagctctgctgacctatggcgggcaaggacaggcgcatgtgacgccggaaagcctgcaactgtccgccggacaggatgtaattacgacggcaggtcgtcacgccagtatgaacgtgatgaagaaattctcgctggccgttggcgaaaaactctcattgtttgcccgcaagctaggtattcagatggttgccggcgccggggatatcaccacgcaggcgcagcgcggcgccatacatatgctctctcagcaggattttacgctcaccagtacggacgggagactgcatggcagcgccaaacagggcatacaactggtgtgcggaggcggcgggatccgtatcagccctgatggccaggtcgagattttctctcctgtcggggtcgatattaaagggccgaatctcaggtatctggggccagaaagcgcgcaggtgcaagcacctgcctttgataaaggaacctttacgcgtcgctatcaactgcatgcttctgacgatccggaacaggttctggcgaatcgtcctttcaggctcaagagctcaaccggcgaagtgctcgagggcgagacggacagcaatggttgctctccattgctcgattcggccgatcttgattcgtacaaactggaggtactgtaa

SEQ ID NO: 445 - DNA, 1260 bp, artificial
  Centroid sequence
atgaaatttgattgcgccatcgtcggcggcggactggccgggctgttgtgcgggctggcgctgaatcaacacggcctacgctgcgtgataatcagccgtgggcaaagcgcgctgcacttttcctccgcttcattagacctgctctcggcgctgccgaacggcgataccgtcactgatgtcgcacaaggtcttcagcaactggccgttcagcttcctgaacacccctactcccgcctcggcgccgacgcggtgctcgaatacgccagacagaccgaagcgctgctggctgcctgcggcgcgaatatgcaaggcgaagcgcgccgaccgcacctgcgggtaacgccgctggggacgttgcgaccggcgtggctgtcaccggaagaggttccgctggcgcccatcgcgcagcaacgcgtatgcatggtggggattagcggttttgccgattttcagccgcatctggccgccgccgccctcggacagagcggagtggatgccgccgcggcggagattgatttaccgctgcttgatgtgctgcgcgataaccctacggagttccgtgccgccaacatcgcccgggtgcttgatgatgaaaacctgtggcctgccctgcagtccgcgctgctgccgctggcgcaagagtacgagctgctgatgatgcccgcctgttttgggctcgcggataatcgcctctggcattggctacaagaacatctgccctgcccgctgcgcctgctgccgacgctgccgccttcggtgccggggatgcgcctgcatagccagcttcagcgccagttcatccgcaccggcggcacctggcttgccggcgacgaggtggtgaaaatcagccatcagcagggcaccgtcgaggccgtctggacgcgaaatcacggcgatatcgcactgcgtccgcgctttaccgtgttggcgagcggtagctttttcagtaacggtctcgtcgccacccgtgatagcgtgcgcgaaccgattctcggcctcgatctgcagcaaacgctggcgcgcgatagctggtatcagcgtgatttcttcgcatcacaaccgtggcagcgctttggtttgaagactgaccccatgctgcgcccacacctgctcggccagccgctaacgaatcttttcgctatcggctcgctgctcggcggtttcgatgccattcaactcggctgcggcggcggcgtttgcgccgtcaccgcgctgcatgccgccagacagatccacgcccttgcaggaggccggtcatga

SEQ ID NO: 446 - DNA, 933 bp, artificial
  Centroid sequence
atgatacctgcagcagaattatatccgcgcgatttgcgcggctacgcgggaaaaccgccgcacgcgcagtggccaaaccaggcgcgtatcgcggtgcagtttgtgcttaattacgaagaaggcgccgagaatcacgtcctgcacggcgatgcgggttctgaacagtttctctccgatatcattggcgctgccagctatcccgatcgccatatgtcgatggactcattgtatgaatatggcagccgcgcgggtttctggcgtatccatcatgcctttcaggagcgggggttaccgctgacggtatttggcgtggcgatggcgttggcgcgtcatccggatatcgtcgcggcgatcaaagcggccaactacgatgtggtcagccacgggtggcgttggatccactatcagcatatggcgattgaacaggagcgtgaccatctgcataaagcggtgcaggtgctgaccgacctgtttggcaaaccgcccaccggctggtataccgggcgcgatagccctaacacccggcaactggtggtggaacatggcgggtttgattacgacagtgactattatggcgatgatttgccgttctggacggaggtgccttgcgccgacgggcaacgtaaaccgcatctcatcgtgccttacacgctcgatgccaacgatatgcgctttgccaccgctcaggggtttaataccgctgaacagttttatacctatctgaaagacagctttgatgtgctgtacgcggaaggtgaaacgtcgccgaaaatgatgtctatcggcatgcactgccggttgctgggccgccctggacgctttcgcgctctgcaacgttttctcgattacgtgcagcagcatgagcgcgtgtggatttgtacccgccagcagattgccgaccactggcggcaggtgcatccgtaccagccatag

SEQ ID NO: 447 - DNA, 231 bp, artificial
  Centroid sequence
atgatttttcagcaggcacctcagctagagactgagcgcttaattctaaaacatttcacgttagaggatttttccgctcttcaggcatgctgggctgatccagaaatggttaagataaatggcggagaagttcccacggcagaagcagtatgggcccgcttgttacgttacataggtcactggcaagctttaggttatggatactgggctgtttttgaaaaagcaacataa

SEQ ID NO: 448 - DNA, 369 bp, artificial
  Centroid sequence
ttgttgggacaggaggtgggggataaatatcaaggaaacaacagtcacagagagcggattatgaaaaatatcgttttatgctgtgccgcaggtatgtccaccagcatgctggttcaacggatgaaagacgctgcccagaaaaaaggcgtcgaggtggatattaaggccgttccggtcgcggagtttaaagatattatcggcaccgccgacatcgtactgcttggcccgcaggtcaaatatgaacagcccaagtttcaggaaattgccgatccgctgggtaaaaaagtcgccgttatcgacatgatggattacggcatgatgaaaggcgacgtggtgctggataaagccctcaagatgctggagcaataa

SEQ ID NO: 449 - DNA, 2268 bp, artificial
  Centroid sequence
atggcaaacggcttgatgttttcccctcgtaaaaccgcgctggcgctggctgtcgcggtggtttgcgcctggcaatcacctgtcttcgctcacggtagcgaagcgcacatggtgccgttggataaaacgctgcaggcgttcggcgccgatgtgctgtgggatgactacgcgcaaatgttcaccctgataaaagacggcgcttacgtcaaagtaaaacccggcgccaaaacggcgatcgtcaacggtaacccccttgatctacaggtgccggtagtaatgaaggaaggtaaagcctgggtctccgatacctttatcaacgatgtattccagtccggtctcgatcagaccttccaggtagaaaaacgccctcacccgctaaactccctctcggcggcggaaatcggtgaagcagtgaccattgtcaaagccgcgccggagttccagccgaatacccgttttactgagatttccttacacgagccggataaagcggcggtatgggcctttgccctgcagggaacgcccgttgattccccccgcaccgccgatgtggtgatgcttgatggcaaacatgtcattgaagccgtcgtcgatctgcaaaacaaaaaaatcctctcatggacgccgattaaaggcgcccacgggatggtgctgctcgatgacttcgtcagcgtgcagaacattatcaatgccagcagcgagttcgctgaggtgctgaaaaagcacggtattaccgatcccagtaaagtggtcaccaccccgctcaccgtcggctactttgatggcaaagatggcctgcaacaggatgcgcgtctgctgaaagtcatcagttatctggataccggcgacggcaactactgggcgcacccgattgaaaacctggtggcggtggtcgaccttgaagcgaagaaaatcatcaaaatcgaagaaggcccggtgatcccggtaccgatggaaccccgttcttacgatggtcgcgaccgcaacgccccggcggtgaaaccactggagataaccgaaccggaaggcaaaaactacacgatcaccggcgataccattcactggcggaactgggattttcatctgcgcctgaactcgcgcgtcgggcccattctctcgacggtgacttacaacgacaacggcacaaaacgccaggtaatgtatgaaggttccctcggcgggatgatcgtcccctacggcgaccctgacgtcggctggtatttcaaagcctatctggattccggcgattacggcatgggcaccctaacatcgccgattgttcgcggtaaagatgcgccgtcaaatgcggtactgctggacgaaactatcgccgattacaccggcaaaccgaccactattccaggtgcggtggccatattcgaacgctatgccgggcctgagtataagcacctggaaatgggcaaacccaacgtcagcaccgaacgccgggaactggtggtacgctggatcagtaccgtcgggaactatgattatatctttgactgggtgttccatgacaacggcaccatcggtatcgatgccggcgccaccggcattgaagccgttaaaggcgtgaaggcgaagaccatgcacgaccccagcgccaaagaggatacccgctacgggacgctgatcgaccataatattgtcggcaccacccaccagcatatttataatttccgcctcgatctcgacgtggacggcgaaaacaacaccctggtggcgatggatcctgaagtgaagccaaacaccgccggcggcccgcgcaccagcaccatgcaggtgaatcagtacacaatcgatagcgagcagaaagctgcgcagaaattcgaccctggcactatccgcctgctgagcaacaccagcaaagagaaccgcatgggtaacccggtctcttaccagattatcccttatgccggcggcacgcatccggcggcgaccggcgccaagttcgccccggacgagtggatatatcatcgcctgagctttatggataaacagctgtgggtgacgcgttaccacccgacagagcgttatccggaagggaaatatcccaaccgttccgcccaggataccggcttaggccagtacgcgaaggatgatgagtcgctgacaaaccacgacgacgtcgtgtggatcaccaccggcaccacccacgtcgcgcgcgccgaagagtggccaattatgccgaccgagtgggcgcacgcgctgctcaagccgtggaacttctttgacgaaaccccaacgcttggcgagaagaaaaagtaa

SEQ ID NO: 450 - DNA, 363 bp, artificial
  Centroid sequence
atgatgaaaataaaacctatccgcactgaacaagattacgaagccgcgctaagcgcggttgaacctttttttgataatgaaccagcgcttgatacgccagagggcgatttttttgaggtgatgtgcctgctgattgctgagtatgaaaaaaagcactatcccatcgagccgccgacgccgatagaggcgatcaagtttcgcatggagcaacaggggctgaccgtcaaagatctggagccggcgataggtaaatcgaatcgtgtctatgaaattctcaatggtacgcgcaacctgacgctcccgatgattcgccggcttcatgcgcagttcggcatcccccttgagagcctgatcggcgcgtga

SEQ ID NO: 451 - DNA, 303 bp, artificial
  Centroid sequence
atgaagataatctcagtgaaaaccttaagggacttctgggcggagaatcccgacgctgaacaaccgctaaaggcctgggtagacgaagcgacaaaagcagactggaaaaccccggcggagataaaggaccaataccgcagcgcaagcatattgaaaaataagcgggtggtattcaacattaaaggaaatgattaccggttaatcgtagccgttgcttatctgcgggggtgggtgttcgttaagtttatcggttcgcataaggaatatgacgagataaacgctgagacgattgagaggaagtaa

SEQ ID NO: 452 - DNA, 909 bp, artificial
  Centroid sequence
atgcaaataagcagagctgatgtcgccgatctcatttatttcatggctattgcacgtcatcgcagtttcagccgtgcggcgattgaattaggtgtcagtgcatcagcgcttagtcatgctctgaagggactggaaacccggctcggggttcgcctgcttaatcgtacgaccaagagcgttacccctacggctgcaggtgaagaactggttcagtctgtccttcagcctttcgacaagatagaaggcgcgcttgaatcgcttaaccggtatcgtaatacccctaccggacgtatccgcatcaatgctgccgttgaagcggccaatcttttgcttgcgccggtcatgcctgcgtttatggatcgctatcccgatattgaaattgatattgtggccagcaaccgtatggttgacgtcactgatgcgggcttcgatgcgggtatccgctatggtggcaccgtcccggaagacatggttgcccgccgtttatctgccgatattcgctgggttatcgcagcatcccccgactacctggaacgttacggaacgcctgaacatccggatgatttgttacaccatcgctgtataagcaatcgtctcggcgacgatcggatttatcgctgggaacttgagcgagacggcgaaacgtaccaaatcactgtgccaggctctgtgacggtcaatcaggctgaaacgggccttgtggccgtattaggcggagccggcctgatgtattttccggagcctcttgttgcaccctatgtgaaggatggacggctccgcctggtgcttacggagtggtccccgctggaggaaggttttcatatctattattcaagccgccggcaactaccgaccgggcttcgccttctgattgagttcatccaggaggccaggccgctggggttgtga

SEQ ID NO: 453 - DNA, 1188 bp, artificial
  Centroid sequence
ttgcttaccgacacaaaattaagaaaagctcttggcaaaaaaagagaccaaatcgaggtcatttcagacgcacatggtctgaatgtcaggttgtctacatccggcagtataacattcttttaccgctacagatggaacgggaaagccgctcaactaacgattggtgattatccaaccacctcattagctcatgcgcgagaacgtaggcagcagttcagggcttggctagcggaagggcttgatcctagacggcaagtagtactcgagaaacagaaaaaagtagaagcgcttacagtgaaagaagcattcgattactgggagaagtactactgcatccctgaaggtctggtaaaaatcaaagttaaccgccgcgacttcaataatcatatagccccagtgctcggaaatatgattgtagatcagacaactaaagctcactggctaaatctttttgacggtatggggcgaagagtggttacagggcaaatgcttggtttgatgcagcgcacatttcgtttctgttccaaccgtggggtaattaacgtgaaccctattgaaagccttagacgatcagatgtagggctcacagcagctgtaaaagaccgcaggttaagtgatgatgaaatcattactgtttggaatgccctgcctcagatgaaatataggcagcaattgataatgaagtttctcattatgactggctgtcgaagtacagagatcagaacagcaaaatgggaatggtttgatttaaaggaacagacatggactatcccggcaagtgactataaaactgggaagtcggtgagaagggcgcttcctgaggctgtaatacagatgatggtagctgaaaaagaaacatcagtttcaaaacatattgtgacgttgtcacgatacagggggccagaagatgacaggccgccacttcaaccaaatgtggctctgttctctgcgcagataattgcaaaaacagggatgaaaccttggtcgcttcatgatttgagaagaacagtggcgacgcgcctttctgaattaggtgcgccaccacatgttgtggaaaagctactagggcatcatatgtctggagtcatggcgcggtataacctccacgattatttggatgatcagcgtcattggcttgctgtttggcagcgtcatcttgagaagttgattggccggcctctggtttga

SEQ ID NO: 454 - DNA, 804 bp, artificial
  Centroid sequence
atgaaaagcgtacttgcagcagcggctatgtcgcttgttatttctgattttgccaatgctgaggaaacaagaggtaaagctatgatgaaaatagaaccgtcagcgatttcggaagctgatattcgttccgtctcaccggctctcgcgcgctttggtcgcgaagctattactgaagatctgtggacacgcgacgccctctcaccgagggatcgtagtgtggtgaccgtcgccatgctgattgcccgcaaccagcctgccgagcttaagcactatattgacgtcgctctcgatagcggcgtgacgccagcggaattatcagaaatcattacccatctggcgttctactcaggttggccaaatgcaatgtcagccgtcagcgtgaccaaagcagtatttgaaactcgtggcgtcacgccagatgcgcttcctgacgcttctccggacctgcttcctctcaatcaggaagcagaaaagcagcgttcagagacagtggaaaaaaatgttggccgaatatctccaggcttggttaaatttactgctgacccactgttcctggatctctggcaaagacccgcgctaaccccccgtgatagaagcctgattacggtcagcgcgttaatcgcatctggacagagcgcgcagattggctatcaccttaacagagcgatggataatggactttctgctgaggaagctggggagatcgttacccaagccgcgttttacgctggctggccaaacgcatttaccgctgctcctgttgtcggagaggtattaatcaatcgctcatcgagtaaaacgtaa

SEQ ID NO: 455 - DNA, 2205 bp, artificial
  Centroid sequence
atggcgcgtcttaaaactgctcagccaaatcactcgctgcgtaaaatcgcagtcgtagtagccacggcggttagcggcatgtctgtttatgcacaggctgcggaacaaccgaaagaagaaaccctcgtcgttaccgcggcgcccgccagccaggaaagcgcctgggggccggccccgactatcgcggcgaagcgttccgccacggcgaccaaaaccgatactcccattgaaaaaacgccgcagtctatctccgtggtgacccgcgaagagatggacatgaagcagccggcaacggttaaagaggcgctctcttacacgccgagcgttttctccactcgcggtagctcgaccacctatgatgtggtcaccattcgtggattcaccacctccagcacggtgaacaccaaccagtatctggatggcatgaagctgcagggtaacaactactctgaagtctccatggatccgtatttcttggaacgcgtggaagtgatgcgcgggccaacctcggtgctgtacggcaacagcaacccgggcggtatcgtcagcatggtcagcaagcgtccgaccaccgagccgctgaaagaaatccagtttaagatgggcaccgataacctgtggcaaaccggtttcgacttcagcgatgccattgatgatgacggcgtgtggtcataccgcctgaccggattaggccgcagccaggatgcgcagcagcagatggcgaaatcgacccgttacgccatcgctccgtccttcagctggcgtccggatgataaaaccgatttcaccttcctgagcaacttccagaatgacccggatgcgggttactacggctggctgccgcgcgaaggcaccgtggtgccgtattacgatgccaacggtaaggcgcacaagctgccgaccgacttcaacgaaggcgagtccgataacaagatggcgcgccgtcagcagatggttggctatagtttctcccaccagttcgatgacacctttaccgtgcgtcaaaacctgcgctatgccgatgtgcatacgctgtatcgttcggtctatggctatggttatcaggagcctggtaaaatccagcgcaactatgttcgttccgatgagcacctgaatacctttaccgttgatacgcaactgcagtctgatttcgccaccggcgcggtgaaccacacgctgctgaccggcgtggactactcgcggatgcgtaatgacgttgacgcggactacggtacggccgatgccattagcatgagtaatccgcagtacggcaatccaaatattgtgctgaactccaaatatgctgtgcttaaccgtatggagcagacgggcctgtacgcgcaggatcagatggaatgggataaatgggtgatgaccttaggcggccgttacgattacgcgactacgtctaccttcacccgttccaccagcaacatggcggagaatcacgaccagcagttcagctggcgcggcgggatcaactatctgttcgataacggcatctccccgtacttcagctatagcgaatcgttcgaaccggtatctggctcaggcctcaacggtaaaccattcgatccctcacgcggcaagcagtatgaagccggcgtgaaatacgtgccgaaagatatgccggtggtggtgaccgcggcggtctatcagctgaccaaagataaaaaccttacagcggatcccaacgacaccagcggttttttcagcgtgcaaaccggcgaaatccgctcccgcggctttgagctggaggcgaaagcggcggtcaatgccaatatcaacctgactgcggcttacagctataccgatgccgaatacactcacgacaccgtcttcgaaggcaagcgtccggcggaagtgccgcgtaatatggcctcgctgtgggcggattacaccttccacgaaaccgcgcttagcgggttgacgattggcgcgggcgcgcgttatatcggctcaacggtgagttattacaagaatgttgaagggaagaaaaatgattccttcaatgtggccggttatgcgctgatggatgcgacggtgaaatacgatctggcgcgctttggtctgccggggtcttcggtcggcgtcaacgtcaacaacctgtttgaccgcgaatatgtctccagctgctatagcgagtacgcatgctactggggagcggaacgtcaggttgttgctaccgcaaccttccgcttctaa

SEQ ID NO: 456 - DNA, 1110 bp, artificial
  Centroid sequence
atggaaaacactaacattgttacagccgaacagcaggcaccaaacaccatttcagctagcaacgcgatctttaacgttcaggctctcggtcagttaactgctttcgcaaaccttatggctgattcacaagtgacagtgccagctcaccttgcaggtaagccagccgattgtatggccatcgttatgcaggctatgcagtggggcatgaatccctatgcagtcgcgcaaaaaacgcatttggtaaacggcgtgctcggatatgaagcccaactcgtcaacgcggtaatagccagttccagtgctatcaacggtcgatttcattaccgctacggcggggactgggaacgttgcacaaggactaaggaaattaccagggaaaaacacggtaaaaatgggaaatacaacgttaccgaacgagtgcgaggctggactgatgaagacgaaatcgggctgtttgttcaggtcggcgcgatccttcgcggtgagtcagaaatcacctggggtgagccgctttatctctcgggtgttgtaactcgtaactccccattgtgggtttctaacccgaagcagcagatcgcttatctgggcgtgaaatactgggctcgcttgtactgccctgaagtgatcctgggtgtttatagcccggacgaagttgagcaacgaacagaacgagaaatcaatccggccccggtgcaaagaatgtctgtagctgagattaccagcagttcagacatcaccaccagcgaacaggacgcagctatcagcattgattctctagccgatgattttcgtgtccgcattgaacgcgccgagtcggttgatgcagccaaagccatcagggctgacctggataaagagaaagctgtgttgggtactgttctcttcaccgaactgaaaggtaaagcggtgcagcgctacttcatggttgatgccagaaacaaaattgaggcggccataaattcacttcctaacccgggagatccggaagccgaagcattattcgcgaaggcagaaagcaccctgacctcatcgcgccgacacctcggtgatgaactgtatgaccagttccgtatcacactggacgacatgaaaccggaatacgttggctaa

SEQ ID NO: 457 - DNA, 918 bp, artificial
  Centroid sequence
gtgggcccaaacgcgctcaccatgcagcaacgcaccgttctggagcggctgataacgcgtctggtgacgctgacatcgcagcaaaacgccgaagtgtgggcctgcgtgaagcacgatctgggtctgaaaggcgacacgccgctgctggcgagccatttcagcgcggctgagagcaacctgaatcagcgcttaagtatcgctcagcaaaaccaccaccatcggcaaattctcgcccagctcagcgaactgctgacccaggggaataaccgtcaggcggtgagcgattatatccgccagaattacggtcaaaccgtgctgcatgcgctgacccaggcacagctggagaacgtgctgcatctgctgcaaaacggccagttggcgatcccacagccgcagcagcgtacgccgacgctgcgccctttgctgccggcggaacataacaccctgaatcagctagtgaccaaactggccgccgcaaccggcgaatcgagcaagcttatctggcaatcaatgcttgagctgtgcggcgtgaaatccggcgaactgatccccgccacccacttcaccccactctcgtactggctgcaggcgcgacaaacgctgagcgcgcaaaccgcgccgacgatgaattcgctgcaggcagcgctcaagcaaccgctggaagcgcaggagtggcagaaaatcgccgatttcgcgcaaagcagctggcaggtgacgcccacgacgacattaaccagcccgcaggtgctaacgctattaaataaggtctttgcgctacgcgtggcccgcgcccaggcgacaatggcaattaccccggtcgagccgctgcccgccccccatgcggtgtatagcaaaaaagcgtggacggtggcgattgccctgctggtgttgattattctgctgtggctggtgctgtaa

SEQ ID NO: 458 - DNA, 654 bp, artificial
  Centroid sequence
atgccttccatcgaaacgtttataactttccttctcgcgctgacgctgctggagatttctcctgggccagacatgatgctgactatcgccagaggtgtcggtcagggaagacgtattgcgctgcttacggtcctgggcaatgtatttgtagcaggttttgtgcaagtttcttttcttgtcctcgggctggtaaccgttgttcatgcctggccggttgcgctggatctgttacggtggatcggtgcggcttatctgatgtggctgggcataaaaatgattgcgacttcaggtactgatacgcggctgcgaaaaacggcaaaaatttctgactggaatgccgttaaggaaggcgctctgaacagcctgactaacccaaaatccctgctgttcatgtttgcttttcttcctcaatttgttgatcccgcagcgggtccagtttggctgcaattgcttgtccttggcagtatccaaaagctggcaggaatcgtgtctctggggtcagtcgcgatggcatcaggcacatttggtaactggctaggtaaacacccaggcgttatcaaatggcaggaacgatttacaggtgttgtcatgattggcctgggtatccgcatgttgtttagcgggtccggcatagtatcaaaatctatccgttag

SEQ ID NO: 459 - DNA, 393 bp, artificial
  Centroid sequence
atgtgctatacttttaacgacaggatgtcagcaatgcgtatcttcaaaaccaaatggttcgccagagaggctagctctcatggcatttccgacgacgagctctatcaggcaattcaatctgcgcttcagggcaaggtggttgatttaggaggaggggtttataaaaagcgactcaacaagaatcgcgatcgcgcaatcatacttaccaaaagcgcagagtattggttttatacctttctatatgccaaacaggatatggccaatatcaaccatcgcgaattaatggggtttcgtgagttagcaaaacactatgccaatctctctgaagagaaaacgacggccttagttaaaagtaaagaattagtggagatttgcgatgacagcaaaaaataa

SEQ ID NO: 460 - DNA, 324 bp, artificial
  Centroid sequence
atgacagcaaaaaataaatacaaaagcccggctttcgaagcgatccatagcgctgcgtcggggctattcagcgttggcgcaatcccgcaggaaacaatgcgccattttgatgaatcatgtctcggtagcgtagccgcacttcaacccattgaaattaaagcgctacgtgaacaactcaatgttagccaacccgtgttcgctcgttatctgaataccagcgtgtctaccgtgcaaaaatgggagactggcgctaaacgaccgagcggaatgtcattaaaattgcttagcgtcgtacaaaaacacggcctgaaaatcctactgtag

SEQ ID NO: 461 - DNA, 1020 bp, artificial
  Centroid sequence
atgcagtatacccggctcggtaaaagtgacttacttgtttcccgcatctgcatgggatgcatggggtttggcgatccgtcgacgggtcagcatagctggacgctggacgaaacagcaagccgcgacatcattcgctatggccttgaaaagggcatcaacttttacgataccgctatagcctaccagaatggctccagtgagcgatacgttggccgggcattacgggagatggcgaaacgcgatgatatcgtcctggccaccaagtttctgccgcgaacccccgcacaaattgccggagggatcagcggaaaagaggcaatcgctcaatcccttgaccagagcctgaagaatctggggatggactatatcgacctctacatctaccacatctgggattacaacacgcccattatcgacgtgcttgaagcgttacataccgctgttactgctggcaaagtacgagctgttggtatttcaaactgctatgcctggcagctggcgaaggcgaacgcccttgctgaacgcgaagggctgacgccctttgtttccgtacagagccactacaatctaattatgcgcgaagatgaacgggagctcttcggcctgtgcactgaggataatatcgcaatgaccccctatagcgcgctggccagcggccgcctctctcgtaaagaaggctatacacggcgagccacagaggatgactatgcgcgtggaaaatatgacagcacggctgaacaggatcgcagcattattgagcgtgtagccgaactggccgaacgccatctggtgtcaatgacggaaatatctctcgcttggctgctgacaaaagtcacatcacctgtcgtaggggctacaaaaaaagctcatgtcgatggcgcggtaaacgcagtaaatcttcaactaagtccggaggaaattcagtttctggaagaaacctaccagccgcatgttctgacggggatcatggcgcaaaatacgccgcaaacgaaagatgttaagcaggtctggatgcgatag

SEQ ID NO: 462 - DNA, 900 bp, artificial
  Centroid sequence
atgaataacgctctttataaccagattcgcatcttccagagcattgcgcgggagggcaatatttcggcagccgcaaggaaactggaaattacgcctccctccgtcagcaatgcactaaagctgctggaagagtatatcggtcatccgctttttgtgcgtacgacccgccgtatagagctgacggaaaccggtcaattattgctggaacagaccgctgcggcggtggagtcgctggaaaactcacttgaaagcattcgcgaccagcatcaggagccctcagggatggtgcgaattacgctctcgcgttttgcctacctgttaattcttaagcctgcgatggcagaattctgtcagcaatatccgggtatacagttagaaatttcggtctacgacggtaccgtgaatatcatcaaagagcgttttgatctggggatccgttttggcgatattcttgagggaggggtggtggcccgaccgttaatgaaaccgtttcgtgaaggattatatgcatcctcagcgtatctctcccgacatggaacgcctgaagtgccggcagatctctgtcatcaccagctgattggttaccgttttatcaccaacaaccgcatccttccgctgctcctgaacgatcgcggtgagcagttgaccgttgagatgccggggcagttaatcagcaacgatattgacgttatggcagacgggatccgtaacgggctgggaattgggcgcttgtttgagcctgtctggcagttacagccggacagggagcgctttattccggtgatggagagctactggaaaacctacccgccagtgtatctctattaccccaaaaacgcgggtaaaacgaaaagagtgaaggccctgattgattttctgatatccactacggggcgataa

SEQ ID NO: 463 - DNA, 840 bp, artificial
  Centroid sequence
gtgaatgagttaaggccggacttccctcttgcgcgcttgttaaaagcggcagggctggcgagaagtacgttctactggcaactggcgagcggtaaaaaaccagacaaatatgccgatgataagcggcagattttaacgctgttccataaacataaaggacggtatggatacaggcgaatcacgctggctatccgccgggaaggaagcttactgaaccataaaaaggttcagaggttaatgaaggcgttagatttaacctgctgtatcagaaggaagaaatacaactcttacagaggccggtatgggaaagtggcgggtaatgtgctgaaccggcagttcagtgcggataagcccaaccagaagtgggtaacagatgtcacggaatttaaaatcagcggaaaaaaactgtatctgtcccccgttctggatctgtataacggagaaatagttgcgtatcagatggcgtcccgtcctcttctgtcgatggtggatgacatgctgttgaaggctgtatctgtactgggtaaagacgaatacccgctgctccactcagatcagggctggcaatatcagatggcgcattatcagaaccggcttaaggaggctggtctgaaacagagcatgtcaaggaaggggaactgtcatgacaatgcggtgatggaaagcttcttcggcacgctgaaatctgagtgtttttacctgatggaacacaagaatatcagcgagttgcgcatggctatcgataattacatccactattacaaccatgaaagaataaaacagaaactgaaaggcctgagtccggtagagtaccgaacccaggccctgatagccgcttaa

SEQ ID NO: 464 - DNA, 912 bp, artificial
  Centroid sequence
atgaaaaaagctatttccacgccgcatgacgcagtatttaaaacctacctttcccattcggataccgcgcgtgattttctccggttgtatcttcctgaagcgctaaaggagatctgcgatctgcgcacgctacatttagaatcaggtaattttatcgaagaagatctcagaccttactattccgatattctctactcgctgcaaaccactgcgggcgacggctatatttacgcgctaatcgaacatcaaagtagccccgaccgacatatggcctttcgcctgatgcgctacgccgtcgccgtcatgcagcgccaccttgatgccggacacgaaaaacttccgctggtgatcccggtgcttttctatcacggcctggtgacgccctatccgttttcaatgcgctggctggatgagtttgccgcgccggagctggcgaccacgctctaccacggcgaatttccactggcggatatcaccgtcataccggatgatgaaatcgccactcatcaacgtatggcaacgctggaattactgcaaaaacatattcgacaacgcgatctggcgcagttactcgacaagctgagcgaattattattgactggattagccacgcaaacacaggtgcatgcgctaatgcactacctggtgctcgcgggaaatagccgcgaaccgataaagtttattcgtgagttggcgcgccggacgccgcaacataaggagacgctgatgactattgcagaatatctcgagcagcaagggctggagcgcggtttgcttcagggccggcaagaaggccggaaagaagaagcacagcgtatcgccgccgcgatgttacgtagcggtctcgcccccgcgctggtggcgcagctaaccgggctggcagagcaggaactggcgtcgctttcggcttaa

SEQ ID NO: 465 - DNA, 717 bp, artificial
  Centroid sequence
atgtataaatataaaatgattcgttcagcggctttcgttagcgctcttattttcagtgtgccagctttttgtgccaatccggtgtcatccgataccggtatcggcgcaacattgcagcagattaccgagcaatatcctattcatttcatttctatagagcaaattgttaaagagttaaagaataagccgccgatggatgtcggttttgatattgatgatactatttattattctactcctgcatttatccatggtcagagagaattgtcacctaaaagtaatgaattcctgaagaaaagtgagttttgggatcgacttagtaacggttgggatagtttttccgtccccaaaaaatctgcatctgaattgattaaactgcatctggaacgtggagatcgtatttggtttgtcaccggtcgacaaaaacccactaacggaaaagagacggtgactgaactgttggggagagacttttctatcccgcatgaaaaacttaataaagttatttttgccggagaagataaaggggcaaaagtacaatatatccgtgaccgaaatatcaagttatattatggagattcagatggcgacattaaggatgctcgtgaagctggcgcagaacctattcgcgtgatgcgtgcactgaactcctctaatcagcctatgcctcgcaacggcgcgttagaagaaaaagtattggttaactctgactactga

SEQ ID NO: 466 - DNA, 1359 bp, artificial
  Centroid sequence
gtgacggggttaagccgggatgcggcgcatgcgaaccagacgctgagtccgatatttgataaggagaaagagcagaaccgtctggcgacggcgcagaagataggtgaaatcgggcgccaggtgagtgatgtgctggtgacgcagggcaagctgaacgcgcaggcggcgcagagcgacccggcggcgcgggcagcggcgcgggcgaagctggtagcgggagggaatggcagtccgagcgaggagcaaatcagcgcgcaggtgagccggacggcgacggcggactacgatacgggcggaaagtaccagaaggtggcgcaggcggtaacggcggcgatgcaggggctggcgggtggcaacctggcgcaggcggcgagcggggcagtgagtccgtatgtggcggaaatcattcacagccagacgacggacagcgcgacgggtgaggtgaatgtggaagccaatgcgatggcgcacgcggtgtggggagcgatagcggcggcatcgggaaataacagcgcgctggcgggagcggcaggcgcggtgagcggcgagctgctgggccgctggatagcggcggaatattatccggatgttaagacagaagaactgtcggatgagcagaagtcgacgataagcgcgctgagtacgctggcggcgggactgatgggggggcctagcggaggcagcagcgcggatgcggtggcgggggcgcaggccgggaagaatgcggtggagaataacctgatgggcgggaacgaatggagccagggtgagaaagccagagagcatggcgcagatgttctctcatgcgcagataacccgtctggtgaagcctgccagcgaggaattgctgaaaataaagcttatgcaggtgcgttggcttcagcggggctaatctacctgccggggggaatgcagattactggcgcgataggcggaacggcaaatgctggtatccagtatcttatgaatggagaagttaatccaacggatgtgctcattgcgacgtatgttggagcatttactgcaaatacgggagcctggggaaccgtgggctggaatgcggcaggtggtgcaacatccagctatctgaaaggggataatccttttacaggtggcttaattaatggtttggcctctggggtgggttatggtgcaggaaaactcattgagctgcctatggataaaatttacaacccgatgaagccatggaaagactggatgtggactgatgtcggaatggggatatcgaagccattgtcattagacccaataccaggagttgctggtaatataacaagctcaataataacagaatatagtaatgatcaggcaggtaaaaatttagggggtaagaaatga

SEQ ID NO: 467 - DNA, 816 bp, artificial
  Centroid sequence
gtgaatatactagcttcacttgttctttataagcattctcttcaagaaattgagcttacactcaattcattattgaatgaaaagagtatcagtaaacttgttattgtagataatggctctttttgtcattggttgaatgattataagcatgataaagttgatgtaataaagctctctaataatcagggttttggcgcagggcataacaaggtttttgaaacctataaaaaccaatgtgactattttttgatctgcaatcctgatatttattatgcacaaggtgaagtcgataagttctttgctttttgtaaggaaagatctgtagatctttctgtgccaaagattacatatccaaatggtgcattgcagtacgcgactaaattactacctgcgccattccagctttttggaagacgttttctttcgtcatttttccctgatatcaacaatgattatgagcttcgtcatgccaattttaatacggcattctacgcgccatcaatgtcaggttgttttatgttggtgagcaataacgccattcgacaagttcagggatttgatcttcgcttctttatgtatttagaagatgttgatttctcgcgacgtatcagcgcgggtaattttaatgttgtgtattgtccggattccaccgtcgttcatttatcacaaagaaagtcctaccacagcctaaaatttcttttttatcatatgagttcagcgataaaatatttcaataagtggggatggttttttgataaaggacgtcggcaacttaacaaacgttgtctgtcatcactgcccacaaaatctgaatag

SEQ ID NO: 468 - DNA, 1179 bp, artificial
  Centroid sequence
atgaagtatcttattggtatcatgagttttttagtaattttcattcttgcaatccttgccagtaacaaccggggggctatacgctatcggccattggtcgtgatgttattctgtcaattcacgtttgccggtttgttgttgaaaacaagcctgggtaaccaggtgatagccgttattgctggcgcgtttgcccatttaatggcctatgcgagtgaaggggttaactttgtctttggtggtttgcaaaaccacggcgagctctctttctttattagcgtcctcttgcctatagtttttgtgtccgctcttattggtattcttcaacatctgaagatactaggcttccttatccgttacatcggattgggactcagtaagattaatggcatggggcggcttgagtcgtataatgcggttgcttctgcagtattaggtcaatcagaagtatttatttcagttaagcaacaactgggacttctacctcaacatcgtctttatacgctgtgcacatctgcaatgtcgactgtgtcaatggccatagttggtgcttatatggcgatgttagaaccgcgctatgtagtcaccgctctggtgctgaacctgtttggcgggtttataattgcatcgctacttaacccttatcaggtcgaaccacaagaggatattcttaccgtatctgaaggccatcaaagtttctttgaaatgttaagtgagtatattttagatggttttaaggttgcgctcattgttggggcaatgttgattggatttattgcgttaatcactatgatgaacgccatatttaccgcaatatttggcatctcatttcaggcgcttctgggatatttgtttgctcctatggcctacctggttggtgttccatggcatgaaacggtggatgcagggagtctgatggccaccaaaattgtaagtaatgaatttgtcgcgatgctgagcctgaaaagtatggctgctgaattctcagtacgtactatggctgtactttcggtattcctggtatcgtttgctaacttctcatctattggcatcatcgtaggtgctattaaggcgctgaataatgagcagggtaacagcgcggctcgttttggcttgaaattattatatggtgctacgttggtaagtttccttaatgcgaccattgttggcctgtttttctaa

SEQ ID NO: 469 - DNA, 1053 bp, artificial
  Centroid sequence
atgcttcgtaaaatagcatttttctatccttgggcaacgcatggtggtgtagaaaaggtcatgctcacccgcgccagactgttaaatgataccggaaagtatcaggttgaccttcttttcactcatgattccggtgcagcgaaagcgatcacaaccgcactttcggattgtaaaaatgttaatgtcaaaattgtcaacttcgattatttgctgacccaggattacagtctcatattttgcatcgatttccctgcagccctgacattttgtcatacacataaattgaagtattttgcggaatgccatactccctataaagaaaacagagcttatttaaataatgttccgcacagttgtttggcagtactgtgtccatccatattatttatgaagcagcttgagccagaattgcacaaaaataccagtccgctgttattactgcgcaattttgtgccctgggatcatatcacccatgagccgcatactatccctacgctcccggcatggtcgagaagacctattctcttcctgggacgaatggacaagctaaagaatccgactgaattactggacgcattcgttattttaaaagagcgccatccgggaaaatacatgctcgtactttgcggcccgcagtcttcagaaatcaacattaacgctgaactggagtgcaggaatctggttggcgacgcgatatccttaccgccagtgccattcttaaatgtggacaaactgctgttagcgatctctcgctccaacgggatttttgtgtcgccatcaactggagagtcatttggcctatcggcttctgaagcgatttgcgcagacgtacccgttgtcttgtctaatatcgaagcacataattatttggttgcctcgcgtgaaaacgaattcacttactcgttacatgatgctcgccaattggcagaaaaaataggttctatttctgacaattatgcgcaatccaaggcatcactcgcagcgttaaaagacaaattttccgcccatgcatttatgaatgattgggacgagttgcttcgcagaaccgaatag

SEQ ID NO: 470 - DNA, 1149 bp, artificial
  Centroid sequence
atgcatcacaataaaaactggtccccggaacttgatgggctaaggggattcgcttcgctatgggtacttctcggtcatatatgtatattgacgcaatgtaacatccctattttaagtaacccgggactaggtgttgatctttttattctattgtctgggtatttaatgaccaagaattatatagaaagacagcataaagaaccatgggcttcatccagaacgatattttcattctgggcaaggcgttttttccggattgcgcctctttattatattttacttatagttgccttcctgttcggggaaaacatcggtcacttccgcgatgttattgctactgtatggcccgtcactcaaacagaaaccgcacgttatagagatagttcgataatcaatatcatcactcatatctcgtttacttttggtttattaccttattattcattccgcaccgtacttcccgattggagtatcggcttagaaatgcagtattatgctttatttccattcattatgttattaactatgagactgggattcgccactatatcactcattctgatgttattatgtgccgtagccgcttatgtactccctgagtactttagtgcgtttcccatgccgtcaatgatactcttcaaacttccattatttatagcaggaatgctgatatacaaagcagtatccgagcataaaaaaatatatatactgattgcgatgattgctccgtttattgcattagtcataaaattaagcatttcttataagcagcttattattgaagagatgctaatactgggaatgatgacattactcatcgagcacaaagccagctccccgttaaagaggatagtcgatgctgtaagaaatctgctctcgcttcctgtaagccagtttttaggtgatgtatcctattccgtatacctacttcatctgatgattgtgattccagtcatcggtgtgcttatccaatatactgattttgaaaacttatcggcaacattgcggtttgttatacccacagcaataatcactcctgtcacttatattataggggctaacttgtacaaatacattgagcgatcgggtatcgccatagggcgtaagcttatcagtcaacatagtaataaagagaaggaaatggcctaa

SEQ ID NO: 471 - DNA, 1128 bp, artificial
  Centroid sequence
atgagtaaattcaggctggctctggtgcggcagaagtatcgccccgacggcggcgcggagcgctttgtctcccgcgcgctggaagccctcgacagcactaatctggaactaaacgtcatcacccgcgagtggcaagggccggttaaaccggactggcatattcacatctgtaacccgcgcaaatgggggcgcatcagccgtgaacgcggtttcgccaacgccgcgcgcgcgctctggcagagtgaatcattcgatctggtgcaaagccatgagcgtattccgggttgcgatctgtaccgcgccggcgacggcgttcatcgccgctggctgcaacagcgctcgcgcattttaccggcctggaaaagccgcctgctgtttgccgaccgctaccaccgttatgtgatgcaggcggagcgcgagatgtatcaggacgcgcatctgcgcggggtgatttgcaacgcagagatgatcaagcaggaaattatcgaagacttcggcctgccggcggataaaatccacgtcatctataacgctattgataaccagcggtttctgccgcctggcgaagaaacctttgccgcattacgcgctaaatggcagctaccgctgaaagctagctgcctgatttatgtcggttccggctttgaacgcaaagggctggatgcggcaatccgcgccatcgcccccaccgaccgttatctgttggtggtcggcaaagacaaagaacagaaccgctatcaacagctggcaaaatcgctgaactgcgaagaacgcgtgcgcttctgcggcatgcagtctgaaacgctaccgttctatcagatggccgacggactgctgctgccgacgctgtatgatccattcccgaatgtaattctggaagcgatggcctgcggcctgccggttatcaccaccaccggctgcggcggcgcggagttcatcaccgaaggtgataacggctacgtttgcgacgcgctggatattaccgcgttacagcaggcggtgatggcgctgccaacgcgcgcgctgggctccgctgaaggcgcacgcgcccgcgaacgaattatggattgcaccagcgcgcgactgtcgacgcagctgctttctctctatcaggatctggtgaaataa

SEQ ID NO: 472 - DNA, 1077 bp, artificial
  Centroid sequence
atgacgcctgaaaccctctcctccggccagcagaacccggcgcggatcctggtcattaagctgcgccaccatggcgacatgttgctgatcaccccgcttgtaaacgcgctcaaacagcagtatcccgccgctcgcgtcgatgtactactgtatgctgagacccgcgacatgctggcggcaaatccggagattaaccagatttacgcgatcgatcgcaattggaaaaagcagggcaagcggcatcagctcaagatggaatggcagctcattcgctcgctacgccaacagcgctacgacatggtgctcaaccttgccgaccagtggcccagcgcgattatcagcaaattaaccggtgcgccgacgcgcatcggtttcgatttccctaagcgccgtcatccgttctggcgctactgccacaccgcgcttgcttctacccagcagcacaatcagctgcatacggtacagcaaaatctctctattctggcgccgctgggactggagattaatgatgcgccggcgcggatgggctacagcgaatctgactggacgaccagccgcgcgctgctgccggacggcttccaggaaaactacatcgtgattcagccgacctcgcgctggttctttaaatgctggcgcgaagcgcgcatgagcgcgctgattaacgcgctatcagcagaaggctacgcggtggtgctcacctctggccctgacgccaaagaaaagcagatggtagagaacatcatcagcggctgcccgcaggcgcgactgcactcgttagccggtcagttgacgctccgccagctggcggcggttatcgatcacgcccgcctgtttatcggcgtagattcggtgccgatgcatatggcggcagccctgggtacgccgctcgtcgcgctatttggcccgtcaaagctgaccttctggcggccgtggcaggcgaaaggcgaggttatctgggccggcgacttcggcccgctgcccgatcctgacgacatcaacaccaacaccgaagaacgctatcttgatttaatccctaccgacgcggtcatcgcggcggcgaaaaaggtactggcatga

SEQ ID NO: 473 - DNA, 1005 bp, artificial
  Centroid sequence
atgaaatttttggtcactggagctgcaggcttcatcggtttccatgtcagccaacgccttcttgcagctggccataccgtagtcggcatcgacaacatgaatgactactacgatgtaaacctgaagcaagctcgtctggaacttctggactccccattattcagcttctccaggctggatattgccgaccgtgtagggatggaaaaactttttgctgatgaaaagtttgaccgcgtcatacaccttgcagcgcaagcaggtgtgcgttattcgctggaaaacccacacgcctatgccgatgccaacctgatgggttttttgaatatcctcgaaggctgtcgtcatactaacgttcaacatttagtctatgcctcatccagttcggtttatggcttaaaccgtaagatgccattttcaaccgatgattcggtagatcatccggtatctctttatgcagcaaccaaaaaagccaacgagttgatggcgcatacctatgcacatctttatggcatcccgacgactggcctgcgtttctttaccgtctacggtccatggggacgtccggatatggcacttttcaaatttacgaaagccatgctcgaaggtaaaagtatcgacgtatacaactacggtaagatgaaacgtgacttcacttatattgatgatattgtcgaagcagttgttcgtgttcaggagactattccacaaccggatccggaatggactgttgaagccggttcaccagcaaccagttccgctccgtatcgggtatataacattggcaatagctcaccggttgaactaatggactacatcaccgctcttgaagaagctatggggatggaagcgaagaaaaacatgatgccgatgcagcctggtgatgttctggagacaagtgctgaaacccgaccgctgtataaccttgttggtttcagaccgcaaactccggtcaagcaaggagtgaagaacttcgtggagtggtataaagcgtactataagtcctga

SEQ ID NO: 474 - DNA, 1023 bp, artificial
  Centroid sequence
ttgagagaagcgttgtattgctctaccatgacccgatacgtatggcctgaggacgttttcgtgcacaatcccgcatttctcatcacgattgatacagagggcgataacctctggcaaaaacatgacagcatcaccaccgagaatgcgcgttatcttccgcgttttcagcagctttgtgaaaagtatggctttaaaccggtctatttgaccaactatgaaatggccatcgaccccttttatatcgaattcgccagagacgtgattgcccgcggcaccgcggaagtcggcatgcatctgcatgcgtggaacagcccgccgaccgagccgctgaccgcagatgactggcgccataagccttatcttattgaatacagcgacgctatgatgcgtgagaaggtcgactatatgacgcgtctgctggaggataccttccagaccaaaatggttagccatcgcgccgggcgctgggcttttgacgagcgctatgcgcgtctgctggtggagtacgggtatcaggtggattgctcggtgaccccgcgggtgaactggaagaccgccaagggggcgccgcagggcgatggcgggaccgattatcgccgctttccgcagcatgcctatttcctcgatgaaaatgacatcagccgcgagggccactcgccgctgctggaagtgccgatgagcatccagtacaagcactcagcgtggatgaacagcgtgaagcagggctacgaccgcctgcgcggcaaagtgcgttccccctccgtacactggctgcgaccgatgggcggcaatgtggagacgatgaaaaaagtcgtcgaacaaacgttgacgcagggcaatgactacgtggaatatatgctccactcttcagagtatatgcccggcggcagccccacgttccagaatgaacgggatattgagcgtttatacgctgacctcgaagccttttttagctggctggcgccgcaggtgaagggcatgacgctggcagaatattaccagcggaaaattacacagcgctaa

SEQ ID NO: 475 - DNA, 261 bp, artificial
  Centroid sequence
atggacgataaaaaaagtatttctgattttaccgaagctgaatttttagctttcgtaaaaaagatatttaacccaaatactacaacggaagacgaagacgtacaaaacgtattagagtttgaacggcttactgagcaccctgatggttctgatgttatcttctatcctccaaaggaccgagaggatagtccagagggggttgtaaaggaagtaaaagaatggcgtgcaaaaaatggcaagccaggattcaaggatagctaa

SEQ ID NO: 476 - DNA, 1092 bp, artificial
  Centroid sequence
atgagcattcagaccaaaactttatcagtcagagttaaagaccgccacgccgccgttttgcggcagatggcctttgaggtcaatcaggtctttaatctggcaaacgagataaccagcgaggcatacagcaacgctggcgtttttggtgcgcaggttccaaagtggttaaccgcgtttgatgttcagaagatgacaaccggcatacagcgtgagcgcggctattccatcggcagcgctacagtgcaggaagtgatcgctcaccacggcaaggcgcggaaacagttcaagcgttcccgcctgcgctggcgcgtcagtggcggcgctcgccgttcgctgggctgggtgccgttcaaatcaaagcaggcgcagtggcaaaacggctgcgttaagttcgccgggcactactttaaagtttgggatagctacggtcttgcgggctacaaattccgcgcaggcagtttttccgaagatagccgggggcgatggtacttcaatatctgcgtagaggttgcgaccgtccataccacgggcgcgaccgctgtcggcatagacctcgggttaaaggataccgccacggtatccgatggcagcaaactgatcgccggtcgtttttatcgcgacctgcaaccagcattaggcaaggcgcaacaggcaggcaaaaaagcccgtgtacgcgccatctacgccaaaattaagaatcgccgcaaagatgccctgcacaagttcagcacggcgctggtaaacagccatgcggcgatattcgtaggcgatgtgagcagcagcaagttagccaaaaccaaaatggctaaaagcgtcctggacgctggctgggcgatgctcaaaacacaactggaatataaagcgattgcgcgctcagtggtgttcgaagtggtcaacgaaaggtattccacccaggcttgttcgtgttgcggggctatctccaacaacagtccgaaaggtagagcaggtttgcgaataagagaatggacttgttgtgagtgcggaaccgctcatgatcgcgacgttaacgccgcaaagaacattctcgcggcaggacattgccgtctagctgtaggaatccccgtcctttag

SEQ ID NO: 477 - DNA, 411 bp, artificial
  Centroid sequence
atggacttaacatatcgaacggggcgacattgcgttttcatgctgcactgtcatttaatcttcataacgaagtatcgcgggcgtgtctttaatgaagcgcacctggaaacgcttgaggggatttgtcgcaacgtttgcgagctgtttgaatgcgaactggtggagtttaacggtgagtcggatcacgttcacatgctacttaacttcccgccgaaggtgtcaatcagcaagctagttaacagcctaaaaggggttagcagccgcaagatgaagttgcatcatccagacctgcataaacccgcctggaagtcagacgctctatggtcgccgtcttatttcgctggcagcgtgggcggtgcgccccttgaagtgattaagaaatacattgaggatcagaaccggcctcattag

SEQ ID NO: 478 - DNA, 1674 bp, artificial
  Centroid sequence
atgtgcagatggctgatagcggcagcgttatggatggcggcggcaatggcaatggcggcctgcccggcgtggtctttgcaacaagccgggcaggagatagagcgcctgagccagcagattgtcgactggaaagcggcctactggcagcagggcagtagcgaggtcagcgatgaggtctacgacatgctatctgcccggttggcgcagtggcggcgctgcttcggtcaggagacgcctgaagacgagctgccgccgccgcgcggcgaagtcaaacatcccatcgcgcataccggggtgcgtaaactgcccgatgccgcgagcgtcggccgctggatgcgcgagaaacccaatctgtgggtacagccgaaagtcgacggtgtggcggtgacgctggtttatcgcgggggtaggttaatacaggcgattagccgcggcgacggtctggcgggggaagactggacggcaaaagtgcgccagatccccggcgtaccgcaaactaccgcaggagcgctggcaaatagcgtgctacagggcgagatttttcagctgcaagaggggcacatacaaaaacaggcgggcggtatgaattcacgggcgaaagtcgccgggatactgatgcgcaaagcgccatcggcaacgctgaatacgctgggggtgtttatctgggcctggcccgacggtccggcccggatgtccacccgcctggcgctgcttgccgacggcgggtttcctctggcgcagcgctattcccatccggtgaaagactggcaggagaccgccgtctggcgcgagcgctggttcgcctcgccgctgccctttgtcaccgatggcattgtgatccgtgcggaaaaagaaccagccgggggccgttggcttccaggacaggggcactgggtggcggcctggaaatatcagccattttcgcaggtggcggaagtgaccacgatccagttcactgtcgggcgcagcggcaagatagccgttgtggcgcatctcgaaccggtaaaactggacgataagctggtgcgtcgggtcaatattggctcggtggcccgctggcggcagttagacatcgtcgccggagaccaggtgctagtaagcctggctggacaggggatcccgcgtctggatagcgtggtctggcgggccagccaccgcgatgcgccacaaccgccttcgccccgttttcattccttaacctgttattatgcgtcgtccgagtgcgccgggcagtttctctcccggctggtctggctatcgtctaagccagttctggatatggggggaactggagaggcgctatggcgcacgctaatagacgatcgccgcatggcacatcttttttcatggctggctttgacgcctgaacaactacagagcgtaccaggcattaccagcaagcgtggcctgcggctgtggcatcagttcaatttgacccgcgagcagccgtttattcgttgggtgctggcgctgggggtaccgatacctcagtccgcgcaggcgagcgttgcggcagaaaactggcagctattgcgggagcgcaatgagtcccagtggcggcaattaccgggggtggggcaggaaagggcgcgccagctggtcgtctttttgcaaaacccggatattgccgcgctggcgcagtggctcagcgggcaacgtattccgggattctga

SEQ ID NO: 479 - DNA, 4068 bp, artificial
  Centroid sequence
ttgagccaggaatacaccgaagacaaagaagtcaaactaacgaagctaagcagcgggcgccgcgttcttgaggcgttactcatcctttgctctctttttgccatctggctgatggcggcattactgagctttaatccatccgatcccagttggtcacagaccgcctggcatgagcctatccataatctgggcggcatgcccggcgcgtggctggcggacacgttatttttcatctttggcgtaatggcctacaccatccccgtgatcatcatcggcggctgctggtttgcatggcgtcatcaggaaaatgacgagtatgtcgattacttcgctgtttcgttgcgcctgatcggcgcgctggcgctgatcctcacctcctgcggcctggcggcaattaacgccgacgatatctggtactttgcctccggcggcgtcattggcagcctgcttagcaccaccttacaacccttgctgcacagcagcggcggcactatcgccttgctctgtatctgggccgcgggtttaacgctgtttaccggctggtcatgggtcagcattgccgagaaactcggcggcgcaatcctttctattctgacctttgccagtaatcgtacccgtcgggacgatacctgggttgatgaaggggaatatgaagatgatgaatatgaagatgaagaagacgacgataccgcacagccgcgggaatcgcgtcgcgcccgcatcttacgcagcgcgctagcgcgtcgtaagcgtctggcggaaaagttcgccaacccgatggggcgtaaaaccgatgccgcgctgttctccggtaaacgtatggatgatgcggaagcagtacaatacagcgccagcggcgcgcctgtcgctgcggatgatgtcctgttctcaggcgccagcgccgcgcgtcctggcgatttagacccttacgatccgctactgaacggccatacggtggccgacccgatcggcgccgcctccgccgctgtcgttgcgccgcaggcatgggcggagcaggggacaggtcaggcataccaaccggaggccgctcacctgcaaccaccggtgtatcagcctgaatatgcgccgcagcagccgccggtttatcaaccggaagccgcgcatcctcagcagccggcgtatcagcctgagtatgcgccgcagcagccgccggtttatcaaccggaatccgcgcatccgcagcagccagtgtatcagccggaatacgcgccgcagcagcagccggtttaccagccggaagccgcgcatccacagcagccagcgtatcagcctgagtatgcgccgcagcagccgccggtttatcagccggaagccgcgcatccacagcagccggcgtatcagcctcagtatgcgccgcagcagccgccggtttaccagccggaagccgcgcatccacaacagcctgtgtatcagcctgagtatgcgccgcagcagccaccggtttaccagccggaatccgcgcatccgcagcagccgatataccagcctgaaccggctgttcaacaacctgtttatcatcaggaaccggcgccagccgctgagcctgagactcctcaggaagaaactaaacgcccgccgatgtactacttcgaggaagtcgaagagaagcgcgcgcgcgagcgtgagttgctggaatcctggtatcagccaatccctgaaccggcgagcccggtggcgaccaaaccgatcaccaccccggctgccccatccaaaccgtcagttgatgccgccgccgtgacggccgtcgccgcaggcgttcatcaggccaccacttctggcagcgcagccgcagccgcctcagtggcgtcaaccgccgctgacgcagcgccagttttcagcccggcatccagcggcccgcgggtacaggtaaaagaaggcattggtccgaaattgccgcgtccgaatcgcgtccgtgtgccgacgcgtcgggagcttgcttcctatggcattaagctgccgtctcagcgtattgctgaagagcgcgcgcgtcgggccgagcttgaacatcattacgataatgagccgctgagcgacgaagaagccgatgcgttggaacaggacgagctggcgcgtcagtttgccgctacccagcaacagcgctatggcgagtcctgggaatccgaaagcgatgagcaggacgaagacgctgccgctgaagccgaactggcgcgccagtttgccgcgacccagcagcagcgctatgccagcgagcagccgccgggagccaatcccttctcaccggcggactatgagttctcgccgatgaaaacgctggtcaatgatggtccaagcgagccgttgtttacgccgacgccggaagtgcagccccagcaaccggctcagcattatcaacaaccggcagccgcgccacagcagggttatcaacctgcgcagccgcccgtacaccatcagccggtagctccgcaaccgcaggcttatcaacctgcgcagcagccaatgcagcaacaacagccggttgctcagcagcccgcgccgtcgccgcaggatagccttattcatccgctactgatgcgtaatggcgacagccgtccgctgcaaagaccaacaacgccgctgccgtcgctggatctcttgacgccaccgccgagcgaagttgaacctgttgatacctttgcgcttgagcagatggcgcgtctggtcgaagcgcgtctcgccgatttccgcattaaagcggatgtggtgaactactcgccgggtccggtgatcactcgtttcgagctgaacctcgcgccgggggtgaaggccgcgcgtatctctaacctgtcgcgcgaccttgcgcgttcgctgtcgaccgtggcggtgcgtgtggtggaagttattccgggtaaaccttacgttggcctggaattaccgaacaaaaaacgccagaccgtatacctgcgcgaagtgctcgattgtccgaaattccgcgagaacccatcgccgcttaccgtggtgctgggcaaagatatcgccggcgatccggtggtggccgatctggcgaaaatgccgcatctgctggttgccggtaccactggttcgggtaaatcggtcggcgtgaacgccatgatcctcagcatgctctataaggcgcagccggaagacgttcgtttcatcatgatcgacccgaaaatgcttgagctgtcggtgtacgaaggtatcccgcatctgctgacggaagtggtcaccgacatgaaagacgccgccaatgcgctgcgctggagcgtcaatgaaatggagcgccgttataagctgatgtcggcgctgggcgtgcgtaatctggcgggctacaacgagaagatcgctgaggccgcacgcatgggacgcccgatcccggatccttactggaaaccgggcgacagtatggacgccgtgcatccggtgctggaaaaactgccgtacatcgtggtgctggtggatgaattcgccgatctgatgatgaccgtcggtaagaaggtggaagaactgattgcgcgtctggcgcagaaagcgcgcgcggcgggcattcacctggtgctggcgacccagcgtccgtcggttgacgtgattaccggtcttatcaaggccaacattccgacgcgtatcgccttcaccgtatcgagcaagattgactcgcgtaccatccttgaccaggggggcgcagaatcgctgctgggcatgggggatatgctctattccgggccgaactccacgatgccggttcgcgtccatggcgcgtttgtccgtgaccaggaagtacacgccgtggtgcaggactggaaagcgcgcggtcgtccgcagtatgttgacggtattacctctgatagcgaaagcgaaggcggtggtggcggctttgatggcggggaagagctggatccgctgttcgatcaggcggtcaacttcgtaaccgagaagcgcaaagcctcgatctcgggggtgcagcgtcagttccgtatcggttataaccgcgcggcgcgtatcattgagcagatggaagctcaggggatcgtcagcgagcaaggccataacggtaaccgtgaagtcctggcaccgccgcccttcgagtaa

SEQ ID NO: 480 - DNA, 846 bp, artificial
  Centroid sequence
atgatgcgcaaaacccagctgctgtctgaacgtcagatgcgggttagctatctggaggctggcgcaggcgagccgctggtgctgatccacggcgtcggtatgaatgcggcgtcctggtacccgcaaattgaggcgctgagccgctatttccgggtgattgcggttgatatgccggggcatggcgatagcgatgcgtttcagcagccggtgatcttaacggactacgtagcctggctgaatgattttttgcgtacccagcctgagcgccgttttgcggtagccggccactcgatgggggcgcttatcgcctccgggctggccattgattatccgcagcgagtgagtcacgcggtggtgatgagcggcgtctaccgccgcaatgaacaggcgcgccgcgccgtactgcagcgggcccgtgaactggcggccggcgaggcgcagttggattcgccgctggcgcgttggttcagcaacgatgcgaaggaagcgattctgcgcgaacaggtcggcggctggctggcggaagtcaatctgcagggctatgccgcagcgtatcaggccttcgccggcggcgatcgggtctatgccgaccgttggcaggagatccgctgtccggttctggtgctgaccggtgaactggatgccaactccagtccacaaatggcgcgggaaatggcagcggcggcgccgctgggtcaggcgatcattattgatggcgcccggcatatggtcagtctgaccgatgccccacgcgtcaaccatgaaatgctgagcttcctgcagtgcggctcggcgcgacagagcaacaatgccaatacggcgggacttactcatgcaaatagataa

SEQ ID NO: 481 - DNA, 555 bp, artificial
  Centroid sequence
atgaatattattaagaccgacattcctgacgtactgatttttgaaccgcgggtctttggcgatgcgcgaggatatttttttgaaagcttcagcagtaaggtttttgatgaagctgtcggacgtaaagtcgagttcgtgcaggacaatcactcccagtcgcagaaaggggtgttacgtggcctgcattaccagctggatccgcatgcgcagggcaaactggtgcgttgtgttgaaggtgaggtgtttgacgtggcggtagatattcgccgcagttcgccgacctttggtaaatgggtcggggtggtgctcagcgcagaaaacaaacgccagttgtggatcccggaaggctttgcgcatggctttatggcgttgagcgataccgtgcagtttgtctacaaagcgacaaactactatgcgccgcagtcagagcggagcattatctggaacgatcccgagattggaattcagtggccagaattgtcgaatggggttccttctctgtcagaaaaggatctacaggcatttaccttgtcaactgcagaagtgtataagtag

SEQ ID NO: 482 - DNA, 678 bp, artificial
  Centroid sequence
atggttgataaccattcactcaaaattgacgccgttccggtcacattacgcgagttggcgctcacaaaagtgcgccaggcgattatcgccggctatttcaaagctggcgaccggctggtcgaacgccagcttaccgagcagcttggcgtcagccgcagcgtggtcagagaagtgatccgctatcttgaggccgaagggctgattgagacgctgccgaaaaaaggcccaatcgttgccgttttaaactgggaaagcgcagagcagatctacaaaatccgtatgctgcttgaacaagaagccgccagcgattgcgccagactcgctaacgatgatgataagcaccagctatatcagcagctccagctaattgcccaagcctcgcgcgagcaggatgatattaaacgggttgaagcctcacaggccttctatgaaaccctgttccgggttgctaagcacaccattgcctgggaaatcgttcaacgcctcaatagccgcattagccgtttacgtgcgctcacgctggcatcgccggagcggcaagttgccggctttgaacggatgtcgcgcatctatgacgccatcgaaaacaacgatcctcagcaggccagacaagcggtactggagcatctgaccgaagccgcgcagcttgccaaacagattctatcctcacaggagtaa

SEQ ID NO: 483 - DNA, 1137 bp, artificial
  Centroid sequence
atgagtgcgattaaaatattatctattttcggaacccgacctgaagcaattaaaatggccccggtagttgagaatcttaaaggcgataaccgattcgaaagcaaggtatgtgttaccgcgcagcatcgcgagatgctcgatcaggtcctgcagttattcaatattactcctgattatgaccttaatattatgaaatcaggtcaggatctcactgatataacatcttctattcttttagggttgcgctcagttcttcaggaatttaaacctgattatgttttggttcatggtgacacagccactaccttgtctgcaactcttgcaagctattatcagcaaatcaaagtcggacatgttgaagctggtttaagaaccaatgatatttattctccatggccagaagagggtaacagaaagttaactggcgcactggctaacttgcattttgcacctacgtcgacttccgctgacaacttacgtcgggagaatgtgccacaggagcgcattattattactggtaatacggtgattgatgctcttcttatggttaaagataagttagcgcaagatcctgttctggcaggtgagttaaaggccaagtttgattttattgatgatgaccgtaaaattgtattaattaccggacatcgtcgtgaaagttttggcggtggctttgaaagaatctgtaatgcggttctaaaattagctaaaacattcccggatgtcgatttcgtctatcctgtacacttaaatcctaacgtccgtggcgtggtaaactccgtactgcgtggacaggataatatttatctcattgaaccacttgattacctccccttcgtcttcttgatgaatgcatcaagcattattctgactgattccggcggtatccaggaagaagccccatcactcggcaagcctgtcctggtaatgcgtgatacaacagaaagaccggaagcggttgatgcgggtaccgtgaaactggtgggtaccgatgagaagtgtatatttgatgccgttgccgaacttttgacgaataaatctgagtatgaagcaatgagctttgcacacaatccgtatggagatggcaaagcatcatcgcgaattgctgatgctatagctcattctcttaacgtttaa

SEQ ID NO: 484 - DNA, 777 bp, artificial
  Centroid sequence
atgtcgttaacacagttaaaagcggcaggttttgacgctgtcgttgattttgatgatgtgaaaagctacgagcgatttaaattactttctgaattgcgtttgccctgcgtgattggttttaacaaagagcaatacaaactctacgatcactccattaactttttagatgctaatagtcatatttcgcagcgttataagcaggtagtgaaactctttggcgggccagatgagcattaccgctattatttgcctggctgtttgaaagaaagagaaaaggttagcgaactgctggccaaagctggagagacgcaactgtgtgtcgcgataaatccatttacagcctcaacagataaggatttttgtcgccatcaggtagaagcgctcgttgaacgcctgcataaccttccttatcgcgtaagtattgtgatggtaggacgcagcgaaaaaatacgtcagcttgaactggatatggttctttatcttactgatagcaatattaattcggcggttgaagtagtacgccactgcgatcttgtgatcactcctgatacctcgattgtgcatatcgcgcgagcatttgataagccaatggtggcggtgtacaacaagcgcaagcttaaggataccggattgccaggctatcttatctgggcgccagggtatgaaaaagcgcggcaaattgtctgtgaagaaaaaaatgtcgcagatatgaaaatagaagcgctctggccggatatcaaagcgctggccgatcgactcgtcgccgcgcggaaatag

SEQ ID NO: 485 - DNA, 909 bp, artificial
  Centroid sequence
atgggatcgctgtttaagcaaatttatcgctatacccgcccgcgcgcctatcgccacaatgagaacctgtggccgtgggtaaaaatccgccgggcggaaagtggtgaaatttgtactttacagtacaaaggcaaaacggtaccgctggtcgatttaacctcgctgcgcaatagcatgcagggggaagtgctgctgacagcaaccggcccttcaacgcgcaacattgatttctccctgctgccaaaacacattccagtgatgggcgttaacggcgcatggcatctgtcggacaaagtcacattctcgctctataccattgtcgatatggagtttttcgataagaagcccgagattattcgccatatcgtccgccaaagcggcattattttgttcaccaccatgcacggcatcgccaaaattctcgatcgccacgctgatgagttgcattgccgtttagcccttatcgaggatggctgttataagatttaccagcccaaaatcgcgagtcatgcgattcaacaagcgtatcaacatgtcgataccctacgcttcgatccccaacggcccgaggtgtgttttagtaccgatattcgacagggaatttttgatgccggcaccgtcgtctactgggctttgcaaatactggcctggctgggtttcaaaacgattctgataagtggtctggatatgaccaatttcagccagccgcgcttctatgaaacgcaacaaaaccaattaccttcttatctggcaacaaaagtagaaaatcttgttatgccgtcttttgcacttgcggctaacgtactgcaacaagagcagatccaggtcattaatttttcgccagaaagcgctattccagaaactatcttcgaaaaggtttcgtttaatgagtacttcaaaaataagtaa

SEQ ID NO: 486 - DNA, 1083 bp, artificial
  Centroid sequence
atgtccacccgcacgaataacctgctgcatttgtctattttattactgctgttgtcactgctgcgccaggataaccggcaggcgctggctgaagttttgcgtgaacagtggcaaacatggggggggttggtagcgttcttcgtctacttctccctcagcaatatctgggggcatacgccgcagcatatcgactcaccgctaacacacggcgtttatctgattttttaccttctgctgatgtcgacgctcctgggtagctcgcaaacccgacggcttacgttgctgtctattgttgccggcgtcaccgtactttcaatctggaccctggctattgatcatactctggtattgaccgagcgggctgtatcgccagaaaacccagggccgactaacgtgatagatttggcaggctactgcggtatcggtcttttgatcagcggtatgttattgaaagaaaaatcgaaccactggttatatattccaattatcatcatgttggtgatgatgttgttaacccaaagtcgtgggccattgatctcactggcaatcgctatttgttgcactctgcatctacatctcttcacgcggcgtaatttgcttattattggcgcactgcttgtactgatcggattagtactttgcctgacgccagtgggcgacatgctgcttacccgttttgaagagttgggaacgcaaagcgggctacgcctgagcatctggcatcatacgttgatggaaatcgctgaccaaccgtggctgggacgtggtttcggctatgaactgaatttcatcaactacagcggtgagcacatcaccaccacgcatagcgtttatctcggttcactgctgaagggcgggattattggtttactgctgttgctggcagtgatcgtctgcggtttacatcaagcctggcgtaagcgccatgacgacagtcgctatagtctggccatcatgctgtatgcgctgatatttatggcttcccaggggatgtttattgtcagtaatccacgtgagacatgggtacttttctggctaccgctagggattgcgctcagtaagagtgtgctgaagaaacgctag

SEQ ID NO: 487 - DNA, 1473 bp, artificial
  Centroid sequence
atgaagaaattgctccccattcttatcggcctgagcctgaccgggttcagcgccatgagccaggcggaaaacctgcttcaggtttaccagcaggcgcgcatcagcaaccccgatctgcgtaaatcggcagccgatcgtgacgccgcgttcgaaaagatcaatgaagcgcgcagtccattactgcctcagcttgggctgggagcggattatacctataacaatggctatcgcgacagcaacggcatcaattcaaacgtcaccagcggctcgctgcagttaacgcaggttctgtttgatatgtcgaaatggcgcgccctgacgctgcaggaaaaaacggcaggtattcaggatgtcacgtatcagaccgatcagcaaacgctgattctgaataccgcgacggcctattttaaagtgctggccgccatcgacacgctctcctataccgaagcgcagaaacaggctatttaccgccagttggatcaaaccacgcagcgctttaacgtaggcctggtggcgatcactgacgtgcagaacgcccgttcacaatacgacgccgtgctggcgaacgaagtcaccgcgcgtaacgatctcgacaacgccgtcgaagaactgcgccaggtcaccggtaactactatccggagctggcctcgctgaacgtgaatggcttcaaaaccaacaagccgcaggcggtcaacgccctgctgaaggaagcggagaatcgcaacctgtcgctgctgcaggcgcgtctgaaccaggacctggctcgcgagcagattcgccaggcgcaggacgggcatttgccgacgctcagcctatccgcgtcgagtggggtatcgaatactagctacagtggttcaaaaacccataataatcctcagcaataccaggataacgatgccgggcagaaccaaatcggcctgaacttctctctgccactgtatcagggcggcgcggtgacctcgcaggtcaaacaggcgcaatacaacttcgttggcgccagcgagcagctggaaagcgcccaccgcagcgtcgtgcagactgtacgttcgtcgtttaacaacgtgaacgcctccatcagcagcatcaatgcctacaaacaggcggtggtctctgcgcaaagctccctggatgcgatggaagcaggctactcggtgggtacgcgtaccatcgttgacgtcctcgacgccaccaccacgctgtataacgccaagcagcagctctccaatgcgcgctataactacctgatcaacgagctgaacattaagtcggcgttaggtaccctgaacgagcaggatctggtcgccctgaacaacacgctgggcaaaccgatccccacctccgcagacagcgtcgcgccggaaaatccacagcaggatgccactgccgatggctacggcaatactaccgcagcggtgaaaccggcgtccgcacggaccacccagagcagcggcagcaatccgttccgtcagtaa

SEQ ID NO: 488 - DNA, 891 bp, artificial
  Centroid sequence
atgaagattttactgattggcaaaaacggccaggtggggtgggagctacaacgttcgctgtccactctcggtgaggtggtcgcggtggactactttgataaagaactgtgcggcgacctgacgaatctcgaaggtatcgctgagaccgtgcgtaccgtccgcccagacgtagtggtgaatgccgccgcgcatacggctgtggacaaggcagaaagtgagcgtgagctttcggatctcctgaatgagaaaggagtggcggttctggctgaagaatcggctaagctgggtgctctgatggtgcattactccactgattacgtctttaatggcgaaggcagtcactatcgcctggaggatgagccgacggggccgctgaatgtctacggcgaaaccaagcgagcgggtgaaattgcgcttgagaaagctaatccccgtcatctgattttccgtaccagttgggtgtatgccacccgcggcgccaattttgccaagaccatgctccgcctggcaggggagaaagagactctctccatcattgacgaccagcacggggcacccaccggggcagaattgctggcagactgtacagcgatagccatccgcgaagaaatgcgtaataagtcggtagccggaacttatcacctggtggccagcggtgaaaccagctggcgtgactacgcatgttttgtttttgatgtggcgaggaagcatggcgcagagttagctatccaggaagtgaagggcattccgacaaccgcttatccgacaccggcaaaacggcctttaaattcacgattgtcgaatgagaaattccagcaggtgtttggtgtgaggctcccggactggcgtcagggtgttgagcgtgtagtgaccgaagtgttgggtaagtaa

SEQ ID NO: 489 - DNA, 1125 bp, artificial
  Centroid sequence
atggtgccaatgctgtttccaccgttcgccatttcaagcacctcacgattcggatctttttatctgctgctgcgtccgatgctgttaccaacctttgagctgacgctcggcctggtggcgttgattgttgcatttggtgcaagtgccagccttgccaagcaatatcaattaccggaacggttatgcgggctcaccggatgtctcgcctttctgctgtttatcggttttcgggataatggcgcgacgaatgtttttctgggagggatggggctttttactgccctcatttcaagcgcatattcgattgaaattataaggtttttttataataaagggtggtgcattcgtttgccggatgaggtgccggtgatgacacggaatggtttccagctgctgatgccgctgctggtgattatgctttccatcagcgtgatgaatgccgtgatgctgcagacgaccggacagattttgccgcaactgattggggaagcattgcgcccactcattgtagcgtcagatactctcacggctgtgcttatctccttgtttctgtgtaatcttttatggttcgtcggtattcacggcgcgctgatcattacggggatcatgaacccgttctggctcacctatctgtttgaaaatcagcgagccctggccgctggagaggctgtgctgccccatatttatttacaggggttctgggatttttatctgttgattggcggtatcggctctacgctgccactggtgtttatggcaatacgaagccgctcaaggcagttgaagagtgtgggaaagattggtcttttgccttctctgttcaacattaatgagccaatattgtttggcttccccgtcatcatgaacccggtttttttactgccctttgtttttgttccgttgataaatgcctgtatagcctggtatttgacgcaaatgggtatcctcgacagggccgttgcaatgctgccatggtcaatgccctcaccgctgggtgctgcatggtcggccaacggtagctggaagaatatgtgcatgtgcctatttgcctttttcaacgcatggatgctttatcgtccattctttaaggttcacgaacgccagctgatgcagctggaaaaataa

SEQ ID NO: 490 - DNA, 816 bp, artificial; identical to SEQ ID NO: 63
  Centroid sequence

SEQ ID NO: 491 - DNA, 642 bp, artificial
  Centroid sequence
atgtctgtcagtctgagcaaaggccagggcgtaagcctgaaaaaaaatgaatacgatctctcgtccgttactatcggcctgggttgggatattaatgaggaaaagaaaggtttcctcggcgggatctttggtaaaaaagaagaagaatacgaccttgatgtgatcgctttcctgtgtaattcagccggaaaggtgaccgatctcggcaatgtggaaaatggtaaaccaacgcttgtgaatggcgatatcatctttttcaacagccttcgccataagtcaggaaatatctggctgacgggcgataaccgaaccggagccggtgacggtgacgatgagcaaattattgtgcgcctgaattcccttgacgctcagtacgagaaaattgtgttcatcgttcagatctacaatggtgaaaagctccagcagcactttggtaaagttcagaatgccttcatccgggcagtagatgcccgtaatattgaaatggcacgattcgatctttctggcggacccgccttcgccagccagcgctccatggtttttgccgagctgatacgcgaggctacaggctggaaactcagggcaattggtgagccttcagaatcagattcgtttgtctcgcacctgaggaattacatgtga

SEQ ID NO: 492 - DNA, 720 bp, artificial
  Centroid sequence
gtgccgttttatcaaatctacaaactctggcctcttcctgaaactactctcctcttccgatctcttaagaaggaattacatttgagacgcttacccgtatatctgctactcgacacgtccggctctatgcacggagagcctatcgaagcggttaagaatggcgttcagacgctgcttaccacgctgaaacaggatccgtatgcactcgaaacggcttacgtgtcagtgatcacctttgattcttcagcccgacaggcagtccccctgacagacctcctgagtttccagatgccagcactaacagccagcggcaccacctctcttggcgaagcgctttccctcacggccagctccattgccaaagaagtacagaaaacgacggctgacactaaaggtgactggcgtccccttgtattcctgatgacggatggaagtccgaatgatgactggcgtaaaggcctgaatgactttaaagcggccagaaccggcgttgttgtggcatgtgcagccgggcatgatgccgataccagcgtcctcaaagaaatcactgaaatcgtggttcagctcgatacagctgacagttcgacgattaaagctttctttaaatgggtcagtgcgagcatttcggtaggcagtcagaaagtggagtccagcaaaaaagaagtgatcggtcttgaagacctgccaccgccgccgccagaagtaaacgtggtcttataa

SEQ ID NO: 493 - DNA, 642 bp, artificial
  Centroid sequence
gtgatgcgccgcctgcctgtttaccttgttatcgacacatccggctcgatgcgcggtgagtccatccattccgttaacgttggaattcaggcgatgcttagcgctcttcgccaggatccctacgccctcgaaagcgttcatatctccattatcacctatgacaatgaggcgcgtgagttcattcctctcacgccgctggaagacttccagttttctgacatcgttgtgccaagcgcaggcgggacgttcaccggtgctgcccttgaatgtctgatgcagtgtgttgaacgggatgtacgtcgctcagatggtgatacaaaaggagactggcgtcctctggtattcctgatgactgatggaaccccttctgatgccctggcgtacggtgaagcggtaaaagcgattcgcggccggggattcggatccatcattgcctgcgccgttggtcctaaagcaggccatgagcacttaaaacagctcaccgataaggttgtgtctctggagacgctagattcaaccgcgtttgcaggtttctttaaatgggtatcggccagcgtgtcttccggcagcacaagcgcggggatcaataacggaactgatacccttccccctcctccaccagaaatccagctggtgctctga

SEQ ID NO: 494 - DNA, 1242 bp, artificial
  Centroid sequence
gtgaatctacaatccggacaaaacataccgcttcagcaatctgcgatcaggctgaatcttcagtaccctgccaaatccggctttaaaggcgaacccgatacctgcctcttcctgcttaatgctcagggaaaggtaaccggcgattctgactttatcttttataataatctgtcttctcctgaaggggcagtaaagctcgttaccggttctcagcagtccagcattgagatagcactggatcgtgttccggcgaacgtcagtaagattgcgatcaccgttgtcattgatggtgaagatactatcagtgggctcagtttattgagcattcaggctcctggtatcgctgattttcaggctgagactcagggccgcagtgagaaagcaatcatcctgggtgaagtatatcggcacaatggcgcctggaagcttcgtgcgctcgggcagggtttcaacggtggtcttgagcctctggccattagctttggcgttgatgtcgcacagccagctccgcagccagcaaagcctgctcgtatcagtctggaaaagaaacttgaaaccagatctccgcgcctcgtaagcctcgctaaaaaagcctcggtcagtctcactaaaaataaactggacacccttgaggcagcggttgcatttgtacttgacgcatccggctcaatgagtggccagttcagtaagggcaacgttcagtctgtgctggaccgcatcgccgttcttgccgcccagttcgacgacgacggtgaaatggatgtctggggatttggagagaagcacaagaagtatccaaacgtcacactggacaacctggacacatatattcagtccattcgcgggtctggaaagcgttcagcctgggagaacctgccgggacttggtgggacaaacaatgagccccctgtgatggaagaaattgtcgactactttaaggactcgaaaatcccggtatatgttgtatttattaccgatggcgggatcagcaagacccgggcgattaaagatgcaatccggcgttctgccaactaccccatcttctggaagtttgtcggcctgggtggttcaagctacggtatcctcaaaaatctggatgactttactgaccgccgggttgataacacccacttctttgccatggatgatttcggttcgatcagcgatgaaaagttatatgataatttactggaagaattcagaccgtggatcgatgaaacaaaaaggttaggcatcctgtaa

SEQ ID NO: 495 - DNA, 924 bp, artificial
  Centroid sequence
atgactaaaacaaaagggttacctcgtccgctgacgcactacgcttggctttccattgccacggctattgccactatcggactcaaaggtgtggcgtggaaaatgaccggttcggtcggtctgctatctgatgccatcgaatccgtagttaacctcgcaggagccctaatggcgctctggatgctgaccttggctgcgcttccggccgatgagaaccatgcatatgggcacggcaaagccgaatatttctcgagtgctttcgaaggatttctgatcctattggcggcagccagtatcgcctataccgcagttgagcggatgttaactccacagccgcttgaggagattggtctcggattactggtttcaacagtcgcatcaatccttaattttgtgacggctcgcattttgttaagggctggcaggcagcacaactctatcactcttgaggcagatgctcatcacctgctgaccgatgtctggacgtcggtcggtgtcatttttggtgtcggactggtttatctgaccggctggttttgggtcgatccgatcgttgcattgctggtcgcagccaacatcgtttggactggttatcagcttatgagtcgttcagctgcaggtctgatggacgtatcgctacccacggaagaactcaaaaaaatcgagtcactgctggcaggatatcgtgaacaggggcttgatttccatgcactacgtacacgccaggctggcgggcgggcgtttatgacaatgcacatcctagttcctgggcgatggactgttcaatatgggcacgactgggccgagcgtatagagaatgatatccgcaccgcactgccttttatccatatcaccactcatgtggaaccgttggaagatcccgcgtcaatgaacgaccaaacgctcgacatttctgatcactaa

SEQ ID NO: 496 - DNA, 1041 bp, artificial
  Centroid sequence
atggtttccacacacatcggcttcccgactgaaacggtcattgttttcattgcgctttcagtcggtgccatctttattgacctgtttatgcaccgtgatgacaagcccatttccctgaagagtgcggcgctctggtccgtattctgggttgtggttgcgatggcatttgccggtttcctctacatccaccacggtgctgaggttgccagcctgtttgtaacgggttatgcgctggagaaagtgctgtcggtcgacaacctgtttgtcatgatggccatcttctcctggttcgccgttcctgatcgttaccgccaccgtgttctctactgggggatcattggtgccatcgtcttcaggggcatctttgtcgccatcggtacgagcctgctgagtctggggccgtatgttgaagttgtcttcgctatcatcgtcgcctggacggcggtcatgatgcttaaaagcggtgatgacgatgatgaaattgaggattattcccagcatctggcttaccgcatggttaaacgcttcttccctatctggccgaagctcagaggtcatgctttcctgcttaaccagaaggaagtggatgccgaactggcgaaaccagaaaacagcgatgtcaccattggccgtggtaaaaaggcggcgctgtatgcgacccctctgttcctgtgtgtggccgtggttgaactctcggatgttatgtttgcgtttgactcggtaccggcaatcattgccgtcagtcgtgaaccgcttatcgtctatagtgccatgatgtttgctatcctgggcctgcgtactctgtactttgtccttgaagcactgaaacagtacctggttcatctggagaaggccgttatcgtgctgctgttcttcatcgcggcaaaactgggcctgaatgcgaccgatcacatttggcatcatggttacagcatcgcggcgacaaccagcctgtatgttgtactgggtgttttggcgctgggcattctcgcaagcgtcatgttcccgggcaaacctgaatctgaggaaaaggggagctga

SEQ ID NO: 497 - DNA, 576 bp, artificial
  Centroid sequence
atggcagtttctctcgtaaaaggcggcaacgtatctctgaccaaagaagcaccaaccatgaatatcgctatggttggcctcggctgggatgcccgtgtaactgacggtcaggcttttgacctggacgcttccgtgttcgcagtaggcgaagacggtaaagtgctgtcagatgcgcatttcattttcttcaataacaaaaccagccctgatggcgcggtagagcaccagggcgacaaccgtaccggtgaaggcgacggtgacgatgagcaggtcaaaatcgatctgaccaaagtctcagcagatatcaaaaaactggtgtttgccgttaccatctatgatgcagaagcgcgtaaacaaaacttcggcatggtgagcaacagcttcatgcgcgtttacaacaacgacaacggcacggaaattgcccgtttcgatctgtctgaagatgcctcaaccgaaaccgctatggtcttcggtgaactgtatcgtcatggcgctgagtggaagtttaaagctgtcggtcagggctttgccggtggcctggcggctcttgcctcccagcacggcgttaacatctaa

SEQ ID NO: 498 - DNA, 1041 bp, artificial
  Centroid sequence
atgagacgccttcccgtgttttttgtcctggactgttcagagtccatgattggtgaaaacctgaaaaaaatgactgatggtctgcaaatgatcgtcggagatttaagaaaggatccacacgcacttgaaacagcctgggtttcggtaatcgcatttgccggtgtagcccgtacgattgtacctcttcacgaaattgcctcgttctaccctccccgccttcccgttggcggcggtacgagccttggggccgcattgcgtgagctgaccgtacaaattgatacccaggtcagaaaaaccactcatgaggcaaaaggcgactggaaacccgtcgtgtacctccttaccgacggacgtccgactgacgacacaaccgcagaagtgaagcgctggaaggatcactacgcgagaaaagtgaatctcattgccgttggcctggggccgtcagcggacctgaatatcctgcggcaactgacagagaatgtcatgctgttcaccgagtctcaggaaggggactttacccgcttcatcaaatggatcacggcctcggttacggcgcacagccgcagcgtcggggacgacaaacaacctgagctcagccagactgaatacatagtccggctggccaaggacgagccagtaaaagcgtacgacgaaaactgcgttacgcttaccggccgttgcagcaagacccgtcgtccgtacctgatgaagtatgaacggccaccagcaagggtttccgggctcgatttcagtctgaacctgaacagctttaatattgccggatgctatcccatcgatgaggactattttgcgtggtcagatgccaccgctaccggtttgcaggtaaataccagcgaactgcatggcgtaccgggttgcccccactgcggtaatgccagtgcgtttgccctgtgctcatgcggaaagttgctgtgtattgacggcccggatgacgtgatctgcccgtggtgtgaaacaggcctgtcattcagcaatgatggcggaaacactaacttcgacgtaaacagagggagaggttga

SEQ ID NO: 499 - DNA, 1158 bp, artificial
  Centroid sequence
atgaacctgacgccggggggcaatgcccccgttccagcccaggagttgcgggtccggatcacctcgggcggccaggtggatgcttcggcgtttcgcctgtatgccgacgggaaggtgcagggtgatgcggacatggtgttttatggtcagccacgcaacgatgatggtaccgtcagcctggtcagtgaaggccagtactcgacctttactgtcgcgctcaaccggctgaaacctgatgtccagaaaattgcgttcaccgtgacctgtgacggtgggcagacggtgtccggtcttcgtaatctttccatcgacgtggagcaaggtgctaccggcctggttagcggcagtgtcgaactgagcggccgtcaggaagcagccttaattctgggtgaattttaccgtcgtaataatgactggaaattccgcttcgttgctcaggggttcaacggtggacttaaaccgctggcagagcatttcggcgtaaatattgccgacgaaccggctcccgcagccccgactcctccggttgtaacccctccgccagttgagacaaaaatcagcctgagcaaggtatcgctgacaaaagagaagcctgcaatcagcctgaccaaacgggataacttcggtgaaatccggatcaacctgaactggcaccggggcagtggcaaatccggctttgcaggcatgttcggctccaaaggaatcgacctggatctgggggcctttgttgagcttcaggacgggtataaatcggtcattcaggcgctcggtaatgcattcggtgattatcgcgatgaaccgtatgttcagctcaagggcgatgaccggacgggtgatgtatcagacggcgagtggctgcatatcaatggacgtgaatggaagcatattcgcgaagtgctgatttacgcctttatttatgaaggtgttcccagctgggacaagactgatggtgtggtcaccattcatgtgccggatcaaccgcccattgagacccgcctgaccgaaggtgaaaaccgtcgcacattgtgcgccattgccagactcgtaaacgaaaacggcgcaattaaagtcgagcgaattaaccagtacttcaaaggccaggacgaaatggaccgggcatttggctggggatttcgctggagcgccggttctaaataa

SEQ ID NO: 500 - DNA, 579 bp, artificial
  Centroid sequence
atgagtgtttctctttccaaaggcgggaacgtctccctgagtaaagcagctccgtcaatgaaaaacgtcctggtggggcttggctgggatgcgcgttcaacagacggtcaggactttgacctggatgcttcagcattcctgctggccgcaaatggcaaagtgcgcggcgattcagatttcatcttctataacaacctgacgtcatctgacggttccgtaacccataccggtgataaccgtaccggtgaaggtgatggtgatgatgaatcgctgaaaattaaactggacgccgtcccgtctgatgttgacaagatcatcttcgttgtcactatccatgatgctcaggctcgtcgccagagctttggtcaggtatccggtgcgtttattcgcctggtcaatgacgataaccagactgaagtcgctcgctacgatctgaccgaagatgcgtccactgagactgccatgctgttcggcgagctgtatcgccacaatggtgagtggaaattccgcgcagtgggccagggttatgctggtggtctggcatctgtatgtgctcagtacggcattaacgcgtcctga

SEQ ID NO: 501 - DNA, 957 bp, artificial
  Centroid sequence
atgaaaaatcgtctttctccctggaatctgggagccacgctatacatgcctgcaacacgggaagatattgctgatgccgtcctgaacggaaaaatacctggtttgcgctctctggtgatttgcctggaggatgctgtcagtgaagcagacatccctgtagccctcaaaaatcttgggcagctgctgcacgaactcagtaacagcatgcttagcttgggtaaaaatgactggcctctggtgttcattcgcccccggcatgccgaaatgggcaaatggttaaaagagcattatgatctttccgctgtcgacgggtttgtattaccgaaatttaccctcagttcgttagctgaatggtgggatatcatgggcgaaactcacctgtgcatgatgccaacgctggaaacagaagacgtctttgacgtggttcagatgcgcgagctggccacccgcctggtggaacatccctgccacgaacgcattattgcgcttcgaatcggcggcaacgatcttatgaacgttgtgtcgcttcgccgtccccgggacctgacgctatatgacagcccgatgggctacgtcatcaaaatgctcgtttcagtcttcggcccgcgtgattttgccctgaccgcgcccgtgtgtgagcatattgacgatcatgccgttatggccagagagctggctcttgatatggcaaatgggcttgttgggaaaacggccattcacccgggtcagatagaggtcattcaaaacgcgctgatggtcactcagggtgagcattctgacgctctgcggatcctgaactctacccaggccgtgtttaagtcgcagggagcaatgtgtgaacccgccacacatcgccgctgggcggctggcattctggacagagctcgtttttatgggttactgaacgagcaaagcgctgatggaatcagattacttaccgtgacccagcatcattaa

SEQ ID NO: 502 - DNA, 456 bp, artificial
  Centroid sequence
atgagctttttcgacaaggtaaaaggtgccattaactctggccgggacgaactgacccgccaggttggtcgtttcaaaaacaaaaaatttatgcacggcaccgttgctgtatgtgcccgtattgccgtatcgagtgacggcgtgagttcggaagaaaagcagaaaatgatgggctttcttcgctcttcagaagagctgaaggtcttcgataccaatgaggtgatcgagttcttcaataaactggtttcaagcttcgatttcgatgttgaaatcggcaagggcgaaaccatgaaatacatcctggcgctgaaagatcagcctgaggccgctcagctggccttacgtgttggtattgccgttgcgaaaagtgacggtaacttcgatcaggacgagaaactggcctcccgcgagatcgctatcgcgttgggcttcgacccggctgaatttggcctctga

SEQ ID NO: 503 - DNA, 435 bp, artificial; identical to SEQ ID NO: 431
  Centroid sequence

SEQ ID NO: 504 - DNA, 276 bp, artificial
  Centroid sequence
atgaaaaagctgctttccgcccttgccctcgctgccgttgttgcccccgtgtgggccgccacccagaccgttacgttgtccgtaccgggcatgacctgctcggcctgtccgatcactgtcaagaaggcgatttccaaggtcgatggcgtcagtaaagttgacgtgaccttcgagacgcgcgaagcggtggtcaccttcgatgatgccaagaccagcgtgcagaaactgaccaaggctaccgaggatgcgggctacccatcatcagtcaagaactga

SEQ ID NO: 505 - DNA, 366 bp, artificial
  Centroid sequence
atgagcgccgacaccgtgtcccggctggcccttgatgccggggtgagcgtgcatatcgtgcgcgactacctgctgcgcggattgctgcgtccggtggcgtgcaccccgggcggctatggcctgttcgatgatgccgccttgcaacggctgtgcttcgtgcgggcggccttcgaggcgggcatcggcctggacgcgctggcgcggctgtgccgggcgctggatgctgcggacggcgatgaagcggccgcgcagcttgccgttctgcgccagttcgtcgagcgtcggcgcgaagcgttggccgatctggaggtgcagttggccaccatgccgaccgagccggcacagcacgcggagagtctgccatga

SEQ ID NO: 506 - DNA, 738 bp, artificial
  Centroid sequence
atgcgcaggacgaagccagtagccgcgccgatggtggcgcgggtctatctgcgcgtcagcaccgacgcgcaggacttggaacgccaagaggcgatcactacggccgcgaaggccgccggctactacgtcgccggcatctaccgtgagaaggcatccggcgcacgcgccgaccggcctgagctgctgcgcatgatcggcgacctacagcccggcgaggtggtcattgccgagaagatcgaccgcatcagccgcctacctttgcccgaggccgagcgcctggtggcctcgatacaggccaaaggcgcacgcctggccgtccctggcgtggtcgatctatccgacctggcggccgaggcccagggcgtcgccaagatcgtgctggaagccgtgcagatcatgctttttcgcctggccttgcagatggcccgcgacgactacgaggacaggcgcgaacgccagcgccaaggcattgagttggcccgccaggccgggcggtacaagggccgccgtgctgatccgaagcgccgcgcccaagttgtcgcgctgcgcaagtccggctacagcatcaacaagaccgccgagctggccgggtacagtgcggcccaggtgaaacggatatgggccgaggtcagccaggccgaagcgaagcagcacggcgcgttcgtggaggacgcattgacggaagccgatgccctggccgctgtcggccaggatgagcgccaggaggaaagggcatga

SEQ ID NO: 507 - DNA, 303 bp, artificial
  Centroid sequence
atggtgcgcaaatatttcggcacagacggtattcgtggcaaagccaacgaaggcgcgatgacggcggaaaccgccttgcgcgtcggcatggcggctggccgtgtctttcgtcgcggtgaccaccgccatcgtgtcgtgatcggcaaggatacgcgcctgtcgggctatatgcttgaacccgcgctcacagccggtttcacctcgatgggcatggacgtattcctttttggcccgctgccgacaacgtataggaagaataaacgcccttttcacccaagtccaacagctttggaccgcagttga

SEQ ID NO: 508 - DNA, 237 bp, artificial
  Centroid sequence
atgaacagcccagagcacttgccgtctgagacgcacaaaccgatcaccggctacttgtggggcgcgctggccgtgctcacctgtccctgccatttgccgattctcgccattgtgctagccggcacgacggccggcgcgttcatcggggagcactggggtattgcagccctcacgctgaccggcttgtttgtcctgtctgtgacgcggctgctgcgggccttcaagggaagatcatga

SEQ ID NO: 509 - DNA, 1479 bp, artificial
  Centroid sequence
atgttgctgtcctcgacgcgtagggactggctgggtaacgtccgtggtgacgtgctggctggtattgttgtcgcgctcgcactcattcctgaagcgatcgccttttccattattgccggtgttgatcctcaggtgggactttactccgccttctgtatcccgctggttatggccttctttggtggtcgcccggcgatgatatcttcatccacgggggcaatggcgctcctgatggtgaccctggtgaaagaccatggtctgcagtacttactggcggcctccatactgaccggcgtattccagctgatagctggctatctgaagctcggcgggcttatgcgcttcgtctcacgctccgtggtgaccggattcgttaatgcactcgcgatcctgattttcatggcgcagctacctgaactcaccaatgtgacctggcatgtttatgccatgacagcaggtggtctcgccatcatctaccttttcccgtatctgaataaaacaatcccctcaccccttgtctgtatcgtggtgctgacggcgattgccatgtggttacatctggacgttcgtactgtcggggatatgggcaaactgcctgacagtctgccggtcttcctgttgccagatatcccgctgaatctcgataccctcctgattattctcccgtactccgcaggcctcgccgttgtagggttactggaatcaatgatgacggccactattgtggacgatatgacggatacacccagtgacaaaaacagggaatgcaaggctcagggcatcgccaatatctgcacaccctttatcgggggaatggcgggctgtgcaatgattggacaatccgttattaacgtaaaatctggcgggcggggccgcctttccacccttactgccggtgtggtcctgctgtgcatggtggtattcctcagggacctggtctcccaaatccctatggccgcactggtcgccgtgatgatcatggtttcgattggtaccttttcatggcgttcagttgcagatcttaaaagccatccaatttctaccagcgtggtgatgctggcaacggtcgtggtggtggtggccactcataatctggcattcggggtactgactggtgtcctgatcgcttccctgaattttgccactaaagtggcgcgttttctggttgtctcttcagaactgaagaaggatacccggttctataaggtcaccggacaggtgttttttgcctccgccgaccgctttatggcgtattttgattttcgcgaagcggtagagaaagttgtcattgatgttgcgcaagcccatttctgggatatcacgtctgtcagcgcactggataaggtggtgattaaattccgcagagaaggaactgaagttgagatccgcgggatgaacgaagcaacccgtactatcgttgatcgctttggtgttcacgataaacccgaagaagtcgaaaaactgatgggaggtcattaa

SEQ ID NO: 510 - DNA, 288 bp, artificial
  Centroid sequence
atggcgtattttctggattttgacgagcgggcactaaaggaatggcgaaagctgggctcgacggtacgtgaacagttgaaaaagaagctggttgaagtacttgagtcaccccggattgaagcaaacaagctccgtggtatgcctgattgttacaagattaagctccggtcttcaggctatcgccttgtataccaggttatagacgagaaagttgtcgttttcgtgatttctgttgggaaaagagaacgctcggaagtatatagcgaggcggtcaaacgcattctctga

SEQ ID NO: 511 - DNA, 240 bp, artificial
  Centroid sequence
atgggtagcattaacctgcgtattgacgatgaacttaaagcgcgttcttacgccgcgcttgaaaaaatgggtgtaactccttctgaagcgcttcgtctcatgctcgagtatatcgctgacaatgaacgcttgccgttcaaacagacactcctgagtgatgaagatgctgaacttgtggagatagtgaaagaacggcttcgtaatcctaagccagtacgtgtgacgctggatgaactctga

SEQ ID NO: 512 - DNA, 2967 bp, artificial; identical to SEQ ID NO: 53
  Centroid sequence

SEQ ID NO: 513 - DNA, 1314 bp, artificial
  Centroid sequence
atgatcaaagagactgttacgatgagtcataaggaactccaccgacttcagattattcaggaacaagctgcggcacgcattggcatttctattcggcaggttaaacgtctggtgcaacggtatagaaatgaagggccttctggtctggtttcccaccgacgtggaaagcgtcctaataattccttttctactgaattcagagcaacagtaatttcactcctcaaaggccgttacgctgattttggacctacgtttgcgtgcgaaaaattgcgcgagatacacggtttatctttatccgttgaaactctcagaaagtggatgatagaagaggggttatggcgtgaacgccgtcgtaaaattgcccgtatatatcaacgccgcatgcgacgaccatcttacggtgaactgatccagattgatggctcacctcatgactggtttgaaaatcgaggccccagatgtacactgatcgttttcattgatgatgccaccagtgcgttgatggcgttgcgttttgtgcctgctgaaacaacccgggcttacatggaaaccctccggggttaccttaatgatcatggcgtaccgctcgctctctactctgatagacacagtatattcagggtaaataacccagagcgggaaggtgagctgacccagttcactcgtgcgataaagacactgggcatcgagccaatccatgccaacagcccgcaggcaaaagggcgggtagagcgcgccaatcagacactacaggacaggctggtcaaagaaatgcggcttcagaatatcagtgatattgaaacagcaaatgcatggttgccgacctttattgaagcctataacaaccggttcgctacgtcgcctcgtactactgataatgctcatcttgatgtgcaccattctgaagaggaactgggttatatcttcagcctacaggcgaagcgcgttctgtctaaaaatctcactttccagtacaaaagcagtgcgtttcaggtacgcagtgagggccggggatatcgacttaggcattcggttgttactgtatgcgagaactttgacggtgaaattaacgttctgtatgacgggaaagcgctgggctgggaaaagtatgttgatggcccggagcctataccactggatgatgaaaagagtgtccatgaacgagtggataatgcccgtattgatttacgctcaaaatactatgttaaacctaaagctgaccatccctggcttacgcgccgaacgcaaagtcatcagcaagttaagcccccgaagttacctaaaaagaagcctgatcccgataaaaaagattga

SEQ ID NO: 514 - DNA, 477 bp, artificial
  Centroid sequence
atgagtcatcaacttaccttcgccgacagtgaattcagcagtaagcgccgtcagaccagaaaagagattttcttgtcccgcatggagcagattctgccatggcaaaacatggtggaagtcatcgagccgttttaccccaaggctggtaatggccggcgaccttatccgctggaaaccatgctacgcattcactgcatgcagcattggtacaacctgagcgatggcgcgatggaagatgctctgtacgaaatcgcctcaatgcgtctgtttgcccggttatccctggatagcgccttgccggaccgcaccaccatcatgaatttccgccacctgctggagcagcatcaactggcccgccaattgttcaagaccatcaatcgctggctggccgaagcaggcgtcatgatgactcaaggcaccttggtcgatgccaccatcattgaggcacccagctcgaccaagaacaaagagcagtaa

SEQ ID NO: 515 - DNA, 981 bp, artificial
  Centroid sequence
atgagccatcaactcaccttcgccgatagtgaattcagcactaagcgccgtcagacccgaaaagagattttcctctcccgcatggagcagattctgccatggcaaaacatggtggaagtcatcgagccgttttatcccaaggcgggcaatggccgacggccctatccgctggagaccatgctgcgtattcactgcatgcagcattggtacaacctgagcgacggtgccatggaagatgccctgtacgaaatcgcctccatgcgcctgtttgcccgattatccctggatagcgccctgccggatcgcaccaccatcatgaatttccgccacctgctcgagcagcatcaactggcccgtcaattgttcaagaccatcaatcgctggctggccgaagcaggcgtcatgatgacccaaggcactttggtggatgccaccatcattgaggcacccagctctaccaagaacaaagagcagcaacgcgatccggagatgcatcagaccaagaaaggcaatcagtggcactttggcatgaaggcccacattggtgtcgatgccaagagtggcctgacccacagcctagtcaccaccgcggccaacgagcatgacctcaatcagctgggtaatctgcttcatggagaggagcaatttgtctcagccgatgccggctaccaaggagcgccacagcgcgaggagctggccgaggtggatgtggactggctgatcgccgagcgtcccggcaaggtaaaaaccttgaagcagcatccgcgcaagaacaaaacggccatcaacatcgaatacatgaaagccagcatccgtgccagggtggagcacccgtttcgcatcatcaagcggcagttcggcttcgtgaaagccagatacaaggggctgctgaaaaacgataaccaactggcgatgttattcaccctggccaacctgtttcgggtggaccaaatgatacgtcagtgggagagatctcagtaa

SEQ ID NO: 516 - DNA, 243 bp, artificial
  Centroid sequence
atgaccttgaacagtaatcacattgactggagggatatgctaatgaagcgacaagatattaacgcattaaagaattttgattttctggcacgcagttttgcccgtatgtacgccctgggccagccagttgatgtcgatgccgtgaccggcaatatgagttatgaacagcaggcatggttccgggagcgatatgaccactaccgaaagcaggctgagcgggcgagagtgatagaactgcgatga

SEQ ID NO: 517 - DNA, 1158 bp, artificial
  Centroid sequence
atggcaaaactctctttttctttcgcggccatccttggcctgctgacggcgatcgggccgctgtgttccgatttttatcttccggcgctgccggagatcgccacccagctcaacacctccacaacgctgacgcagctttctcttacctcggcgctgattggcctggggctgggacaactttttttcggcccgctaagcgatcgcatcggacgtaaaacgccgctgctgttctcacttttgctgtttgtactggcttcagtgctttgtgccagcacgcagaatatttacgccctgatcggctggcgatttgtgcagggcgttgccggggcgggcggctccgtacttgcccgctctatcgcccgtgataactatcatggcacgatgctaacgcagttttttgccctactgatgacggtcaacggcatcgcgcccgtggtgtccccggtactcggtggctatatcgcgtcgcatttcgactggcggatgctgttctgggtaatggcaggggcgggtctggcgctgctgatcgccagccagctttttatccgcgagtccctcacagagaaacagggcgggggatcgctgacgcaaaccgccaggacggtacttaaaaatcgtcgctttatgcgctactgcctgatccaggccttcatgctggcggggctgttcgcctatatcggggcatcctcctttgtgatgcaaaacgagtatggcctgagcgccatgcagttcagcctgctgttcggtgtgaacggtatcggcctgatcgtctcagcgctgattttctcccgtctggcacgccgacacccggcggaagggttaatgcaaataggtctggttttggccgtaacctgcgcggggctgacgttgctctttgcgtggatgcagctttccgttccggcactgattgcactctttttcaccgtcgcatttaacagcgggatcagcaccattgcgggttcagaagcgatgagcgcagtcgacgcgaaggagtccggcacagcgtcagccattctgggcatgctgatgtttttattcggcgggatcgcagcgcctctcgccggtatcggcggagaaacgatgctgaaaatgagtctcgcggtgttagtaagctatggcattgcactaacgatcggatctcgcacgcagaatgcgtaa

SEQ ID NO: 518 - DNA, 651 bp, artificial
  Centroid sequence
atgattgatactgatgacgctgtaattttactcatcgaccatcagagtggcttattcaacacggtacgtgatgtgcctgtaccagaccttcgtaattatgtgacagcgatagccaaagttgccacgcttttaaatatcccggtgatcaccacggcctctgttcctgacggtcccaatggcccgctcatcccggaaattcacaaatatgcaccccatgccgtgtatgttccacgcaccgggcagattaatacctgggataatccggcgtttgtgaaggaagtggaaaagacgggcagaaagaccctgattattgccggaacgctcaccagcgtctgcatggcgttccctgcggttagcgctgtccaggaggggtataaggtttactgtgttgtggatgcctcggggaactggtccaaaatcgcgaccgataccaccatcgcgcgcgtggctcaggcgggagcgatccctaccgatacgtttgccattgtcgctgaattaatgagaacctggaaccgcgcggaaggttctcgctttgctgagatcctggcagagcatgtctgtccggaatataagtgcctgattgaaagtttcggcaaagctcaggaaattgccagaacgggcccggaaaccaatctggagcattataagtaa

SEQ ID NO: 519 - DNA, 906 bp, artificial
  Centroid sequence
gtggatcagctaatggcaatgcgcgcctttacgcgggtggttgaatccggaagctttacccgagcggcagactccctgaacatgccgatagccacgctgagcaagctggtaaaatcacttgaagcgcacctggaaacacggctgctgcatcgcactacgcgccgggtggtcacgacggcagaaggcatggaatactacgagaaagtgctgcgggtattaattgatatagaggacattgataccgcctttcgcgcatcgtgctgcacgccaaaaggccatttgcgtatcgacgtgggaggctcaaccgcccgggacgtgttgatacccctgctgccggatttttttcagcgctacccggacctgcgcatcagcctgggggtagccgatcgtccggtagatttaatcagtggaaacgtagactgcgtgattcgcggcggcccgctggatgactcttcgcttatcgcccggcatatcggtgacgcccggatgatcgcctgcgcgacgccgggctatcttaagactcacggcatccctgcctacccgcaggagctgcgcaacggccataagctgataagctacctttcccccgttaccggacgcgcattcccgtttcggttcctcgagcgaggtgaaccgctggagatcagcgttccgcaccatcttggagtcaatgaaagcaacgcacacctggccgcagcgctggcgggtttagggattattcagacgtttggctatgctgcgagagcgcatctgaaaacgggtgcgctggtagagatcctgagcgactggcgtcctaaggcgtatccttttcacgtggtctatccacagagtcggcatttaacgcatcgcctgagagtgtttattgcgtggcttgccgaggtcttccctgcggcggtaaaaggttag

SEQ ID NO: 520 - DNA, 1266 bp, artificial
  Centroid sequence
atgatgaataaagccactactctctcagctaatattacaacacgctctaactggcactggcaggataacatctggacgctgggcctctatggtacagctgtcggggcgggaacactgttcctgcccgtggaaatcggcacccgtggtccggttatttttctggttatgctcctgctggggctgccgttatccctgatcccccatttactcctttgtcgtgtatatatgcgtgaagagaagactgaaaacggcacgttgccgatcttcggctccttcttcagcggacggggtgaaaagctgatcaccctgttctattgtgtgaccttcttcccggtaaccctggtttacggggtggcgctgattaatgcgctgagtaatttactggtggagcatctgcatattaccgccatcagccgtgggccattgtcgtttatcgtggttgctgcgctgtatgtggtgcttagcaagggccgggacagagtcgtggccattatgagcgcactggcactgccgttcgcggcatctgtactgctgatcgccgtatcacttatcccgggatggcatctgtctaacctgaccgatacggccgctgaaatgaacgccacgccgctgccggtaacgctgaaaaatatctggctgacgctgccgcttattaccttcttgttttgctgtgcgcctatggtctccccgctgagctcttactaccgggagaggaaagcggagggtgagaaaaaggcactgttcgtgatccgtatcgcctacttagctatcttcgccagtatcctctttttcgtgctgagctgcgtgctggggatcccccatgacaactttgtgcgagcgaaggcggaaaacctgaatgtgctgtcggtgatgaagggaaacggtgatttcagcctgatttaccacattgccccgctcatcgctatcatcggtatgacgaaatccttcctcggcgtaggtctgtcggtcgcacaaacgtttggtcagctggctgccagcgtatccggcaaaaaggccaacgccagcaagcggctggcctctctggcgctgttcctgctgacctatggcattgtttatgccaatccggatgtgctcagcctgattgaaatgttctgcggaccactgatcgcggtgatcctgttcctgatcccggcgtacctcatatacacccgcccctcgctggcagagcttcgcggcgtgacggtgtttttggtcgtattgggggggctggcaacgctgtctgcattgctctggacaatgctttag

SEQ ID NO: 521 - DNA, 2178 bp, artificial
  Centroid sequence
atgtcaacaaataaccttcacgcccatgatgcgtctgccgcgaataacgagatcgatctggtgcgcctgttgggtgagctgctcgaccaccgaaaatttattctcatccttaccgcgctgttcacgctggcggcactgctttatgcgctctttgccacaccggtttatcaggccgatgcgctgatacaggtggagcagaagcagggcaacgcgctactcagtaaccttagcgagttcatccctgactcctcgcctgagtcggcgccggagcttcagcttctccagtcgcgcatgatcctcggtaaaacgattgatgacctgaacctgcgcacgcaggtaagtgaaaactattttccccttgtcggacgcggctgggcgcggctcaccgggcgacagcctggcatcgtcgatatccgtatgctcaatcttccccctgtcgcgggccgggcgcaaaagctgacgctgaccgtcggcgagaagggccactatcagctggaaggcgataacgtgacgttacagggcgtcgtgggacagccgctgagcgcggcgaatatcgccattaccattgccgctatccaggcgaagccgggtacgcaatttacgattacacagcagagcgagctggaggccattgacgcgctacagctgcgtttttccgtgagcgagcgcagtaaggacagtgggatgcttggcctgaccatcacgggggaagatcccgatgagatggcgcgcgtgcttaactgcatcgccgataactatttacaacagaacgtggctcgccaggcggcgcaggatgcgaaaagcctgcaatttttgaagcagcagcttccgcaggtgcgcagcgagctggaccaggccgaggagaagctcaaccgctatcgccagcaaaatgactccgttgacctgaacctggaggcaaaagcggtgctggagcagattgtaaatgcggacaatcagctcaatgaactgaccttccgggaagcggaaatttcgcagctctacaaaaaagatcaccccacctaccgggcgctgattgagaaacgccagacgctggagcaggaaaaaaaccgcctgaataaacgggtatcgtccatgccgtcaacccagcaggaggtgttgcgcctgagccgtgatgtggagtcgggacgcgttatctaccagcagctgcttaaccgcgaacaggagctgagcatcgcccggtcgagcgcaattggtaacgtccgcattatcgatccggccgtgacccggccgcagccagtcaagccgaaaaaagcgctggtcgtcgttctgggggttctcctgggtctgttcgtctctgtgggctggatcctggcgcgcagtatgctgcgtatgggcaatgaaacgccggagcagctggaggagcatgggattaacgtctatgccaccgtaccgctgtcggaatggctggctaaaaagatgcgtttgcgcaaaaaagactttatgtcctcagggctgcgccataagaccaaacatatccccttcctggcggcggataacccggtcgatctctccgtggaggcgattcgcggcctgcgcaccagtctgcattttgcgatgatggagtcagcgaacaatatactgatgatctctggcgccacgcctgacagcggtaaaacctttgtcagcagtaccctggcggccgtcgtggcgcaggcgggccagaaagtgctctatattgatgcggatatgcgtcgcgggtatgcccatgatctgtttaagctcgacaatacctgcggcttatcggagatgttgtccggtaaggcggagtatacccagggcgttcagaccttcgataaaggcgggttcgataccatcgtgcgtgggcagatcccccctaatccggcggagcttctgatgcatacgcgtttccagcagcttctggactgggcgaatgaacgctacgatctggtgattatcgatacgccaccgatcctggcggtcaccgacgcggctgtcgtcggccgtcgcgcaggcaccacgctgctggtcgcccgcttcgggatgaacagcgtgaaggagatgctggtctgtgtacagcgtctggagcagagtggcgtcaataccaaaggggtgattctcaacggcgtcgttaagcgggcaagcaacgcttacggctacggctatcatcactacggttacaactactcgagtaactga

SEQ ID NO: 522 - DNA, 669 bp, artificial
  Centroid sequence
atgttatttaatcaaggatttctggtgagactgtttattctgctcatcatgactctgctgatccagggatgtacgccgagccagcagagcattattgagacctttaacgccagcctggacgggcgccaggatgtgacggtaacggacgggcagattcaggtgctcccatactcaaccatgtacctgcgtctggataatggcccgaggatcctggtggttctcggatacatcgagcagggaaacagtaagtggttatcgcaggataatgcgatgatcgtcacgcataacggtcgccttatccacacgctcaagctcccttataacctgcttgaggtaaccaaccttgagcacgatccgctgcgccacacgccgcagctccgcgacggcagccagtggtcgcgtgatgtgcgctggcaggaagaggggcggtatcgctccgcacacctgacctcgcgcttctccctgagcgggacggaaaacctgacccttgccggaaacacgctacgttgtcaggtctggcaggagacggtgcaggccgacggcctcgatcgtcgctggcataacaccttctggattgattccgccaccggccaggtacgccagagcgaacagatgctcggcgcgggcgtattccctgtcgccatgacgatgttgaagcccgccccatga

SEQ ID NO: 523 - DNA, 1134 bp, artificial
  Centroid sequence
atgaaaaacgttaaattttccgtgcttgcgttggctatgatggcgttaagcggttgtactatcgtaccgggccagggactcagcacccagggcaaagatattattgatttgcctgacagcaattacgatctggagaagatggtcaacgtctatccgctcacgccggggctggtcgagcaattgctgcctggcaaagttgactcccgcgccaatcctgaactggatcgccagctccagaattatcaatatcgcatcggcgtcggcgacgtgctgatggttaccgtctgggaccacccggagctgaccacccccgcaggccagtaccgtagcgccagcgatacgggcaattgggtgaacgccgacggcacgatcttctatccctatatcggcaaaatccacgtcgtcggcaaaacgctggcccaggtgcgcgatgagatcgccgcccggctggactcggtgattgaaagcccgcaggtggatgtcagcgtggcggcgttccgctcacaaaaagcctacgtgacgggcgaagtggctaagtcgggccagcagcccatcaccaatattccgctgacgataatggatgcgatcaatgcggcaggcggcctgacggcggaggcggactggcgccacgtggtgctgacccacaacggcaaggacacgcacatttctctctacgcgctgatgcagcgcggcgatctcacccagaacaaactcctctatccgggcgatattctcttcattccgcgtaatgacgacctgaaagtgtttgtcatgggcgaggtgggtaaacagagcaccctgaagatggatcgtagcgggatgacgctggcggaagcgctgggtaatgcccagggtgtgaatcaggatatggccgacgccacggggatctttgtgattcgtccgttgcagggcaagcagaacggcaaaatcgccaacgtctaccagcttaacgcccgggatgccaccgcaatggtactgagcaccgaattccagctggagccttacgacatcgtctatgtcaccaccgcgccgctggtgcgctggaaccgcgtgatctctcagcttgtaccgaccattacgggtgtacatgacctgactgaaacagggagatatatcagaacatggccaaattaa

SEQ ID NO: 524 - DNA, 444 bp, artificial
  Centroid sequence
atggccaaattaacggttaacgccatcctggtgatctgtaccggcaatatctgccgctcccccattggggaacggctgctgcgccagctgcttcccgccgcccgggtcgattcagcgggtatttgtggcctggaaggacgcacagccgattcacaggcggcagagatcgccgccgaacgcggcacccagcttgagggccacgtagcgcgcaggctcacccccgccatggtacgcgactacgatctgattctggcgatggagctggaacatatcgagcaggtcacggctatcgcaccggaggcgcgcggcaaaatgatgctctttggtcactggacgggcagaaaagagatcccggacccctaccgtaaaaaccgggacgcatttgaatatgtttatgggctgctggagcaggccagtctggaatgggcaaaacggctcagttaa

SEQ ID NO: 525 - DNA, 711 bp, artificial
  Centroid sequence
atggctgggtttttgcttttctgtatccgctacgcattgaattttccctcctgtcaggcaatagtgattttttcccctgacaatgaaaatgatatgaacttatctgctttaaaagtcgggtcactgctcctgctgatgatcctgatttataccggcctgttcacgagcgaccgcgtcacctggctgatggaggtgacgcccgtcatcatcatcattccacttctgctcgccacgcaccggcgataccctctgactccccttctctataccttgattttctttcacgccagcattctgatgactggtggaatgtacacctacgcaaaggttccggttggttttgaggttcaggagatgctcgggcttagccgtaatccgtatgacaagctcggtcactttttccagggactggttcccgcactggcagcgcgagaaattctgctgcgcggtgggtatgttcgtgggcgtaagatgacgggatttctggtgtgctgtgttgctctggctattagcgccacctatgaactcattgagtggtgggcagctttggcaatggggcagggtgcggatgattttctggggacgcagggcgatccatgggatacccagtcggatatgttttgcgcgctgctgggcgcgttaacgacggtgctgctccttgggcgtttccatcagcggcaattacgtcgtttgaatgtttgtcaggggtag

SEQ ID NO: 526 - DNA, 1740 bp, artificial
  Centroid sequence
atgcatttttgcagctggtctgcggcgggcgggcagggtatacccttcgcaaaacagggagggataatgatggtgagatggataagcatactgatgatcttcttaagcagcggggcgatggcaatctgcccggtctggtcaccggctaaagccgggcaggagatcgcggccctgaaggcgcagctgacccgctggaatgatgattactggaagcagggcagcagcgaggtaagcgacgacgtttacgacaggcttaacgcccgcttaaaacagtggcagcgctgttttcacgatgagccgctgcacgacgatctccctgccgccagcgggacggtgaagcatcctttcgcccatactggcgtgcataaagtagaaagccagcaggcgcttagccgctggatggcgacgcagcaggatctctgggtccagccaaaggtggatggcgtagcggtcaccctggtttacaaaaacggcaagctggcgcaggcgattagccggggcgacggtttacagggggaagagtggacggcacaggcgcgaatgatctccgctatcccgcaaacgctgaccgggccgcttgccaacagcgtgttgcagggtgaactttttctgctgcgcgaggggcatatccagcagcggatgggcggtatgaacgcgcgtgcgaaggtggcaggagcgatgatgcgcgccaccgatcgcgcagcgctgaagcagacaggcatttttatctgggcctggccgaacggcccaaaaacgatgaaggcacgcctttccgcgctggcggaggcaggttttaccctgacggcgcgctataccctaccggtaaaaaacgcggctgacgtggaggcgcagcgggcggcctggtttaaggcttcgctaccgtttgccacggatggcatcgtggtccgcgcctccgcagagccgccgggcgagcagtggctgccgggtgaagggagctgggtcgtcgcatggaaataccttcctgtggcccaggtgacggaagtcaaagcaatccactttaccgtgggacgtaccgggcggatcaccgcgattgcgcagcttgagccgctgatgctcgacgacaaacgcgtacagcgcgtcagcctggggtcggttaaccgctggcagaggctggatattgcccccggcgatcaggtgctggtaagcctggcgggacaaggtattccccggctggataacgtggtgtggcgcaatgtcgatcgccgtaaaccgcagccaccctcatcgcgctataacggcttaacctgtttctacgcctccccggaatgcatggagcaattctttgcccggctgacgtggttaagctcgagacaggcgttagatatcgaaggaataggtgaatcaggatggcggaccctctatcaggcgcatcggtttgagcacctcttctcctggttacagctcacgcaggagcaactcaccgcgacgccggggatatcagcaacgcatggcgctgcgctatggcatcagtttaacctggcgcgggagcgtccttttatccgctggagcaccgcgatgggaataccgctggcccggtcgacgctcaaggcggcaggggatcgcacctggcaggcgctgattcagcgaagcgaagcggagtggcggaggctgccgggtgtcggacaggagaaggcccgccagatcgtcaactggctgcatcagccccagattgatgcgctggcgaagtggctggccgcagagcacatcggtggattttaa

SEQ ID NO: 527 - DNA, 972 bp, artificial
  Centroid sequence
atgaccagattgcggggcttcagccctcaattcgactctatccagcagttcattttgacgctgacgcacgtggtgtgggagcagaaagatatcggccagctggcggatttttacgccacgccggtggttttcactacccccgaaaaacagctgcatgagctttcccagtttatgcgcctgacgcttgaggcgatgcacagcttcccgcagcgagcggtgctgacggaggatattctgtgcagccagaacccgggggacgagtactatgcggcgcagcgtaccgtagcccgcattcagcaccagggggagggattttttggcccgccgaccgggaaaaatgtctgggtccgcacctgggccgatcgcatctgtgttgatggtgccgtacgccaggagtggctgcttcaggatcgtgccgcgattgtggcgcaactggggctggatgtccgcgactttgcttttaacctggcgaccatgcgccagcagcttgggctggaatctgtgtctgctgagacgctggacgcccgctgggcgggtgggcctgagggcgacgacgtggaaggggcgcttgccggggtcgttgagcgctacttaacgatgtgggcgggcggtaacagcggcgtggtgcccggtctctatcacccggcggcgacgctgtacgcgccggggcactgcctctgcaccggcgaacaggaaattggcgcacagctttccggttatcgcgcttcatttgccgacagcgaaacgcagcttcatcacctgattgtgcgtaaagatcctaatgagccgattcgactttcattgcgctggtcgttgttaacctggcatgacggttacggcaaatttggtgcgccgacccgtaaacccatatcaattaccggtatcagccagcttgaattacgtgatggtttaattttccgtgaatatctggggatcgatgaattagcgatttggtcgcaaatatttaattaa

SEQ ID NO: 528 - DNA, 1317 bp, artificial
  Centroid sequence
atgatgcgcctgataccgtccgaggactgcccggaagagatcgcccgacgactcgacgccatacagcaacatcgcgcgctgaacgcgatcctcggggttaacccggatgccctctctctggcgaaacagtatcaacagctggcccggcaaggggtacagatcggccctttgcacggcgtaccggtgatcgtaaaagataatatcgcctgcgcgccgatgcccgtcacccttggctgccgtgcgctggcctcactcgcagcaacttcagacgcccgcgttgtacagcggctgcgcggggccggggcgattatcctcgccagagcgaatatgtccgagtttgccttcgacgtgcgctcgcgaagctcgctggggggcgatgtggcgaatcccctttgcccgtcggtgactgccggaggctccagcggaggatgcgccgctgcggttgcagccggaatggcggatggcgcgctgggaaccgataccggtggctctgtgcgcattccctgtagttataccgggctggtaggactccggcccacgtttcgccgggcacagttagacggcgttgcgccgctgtcacccagcaaagacaccgtcggacccatggtgcatagcgttgaagatgccgcccttctgcatgccgttatccacggtttgccgccggttgcacttcctgcgcgttcgctgaaaggcgttcgctttggcgtggtgaccgcgttacagggtgaggatgaggtacagctggaggtctggcagtcggcgctggacacgttgcgccgtgccggggcgacgctggtggcggtttcactcccctttctggaagaggtgaggcaggccacctgcctcagtctgtatgaatttcgcgtggcgattgacggctggcttagcaaacagcctggtgccccgtcaggattaacggacattgtggcttccggcgctttcctgccggagtttgcgccgtttctacgccagatgctgacgtgtgacacgctgaaaaccccgctctggctggcggggcgacgttttcagcgtctgctgcggcagaacctgcgccgggtggcggaggcgcagcgcatcgacggatttctgtatcccaccgtacaacgattaccggatagcctggcgaaaatgccgcccggttgcgcgccggagcttgccgccatcagcggcctgcctgccattacgttgccctgtggcgtaagccgtatcgggctgccggtggggatggaaatgttatcggtgcaggaggatgaaacggtgctgatgacgctggcgctggcgtgtgagagggcgttgggcggggagtgtaagatataa

SEQ ID NO: 529 - DNA, 426 bp, artificial
  Centroid sequence
atgagcaatattaccatttaccacaacccggcctgcggtacctcgcgcaacacgctggagatgatccgcaacagcggggttgaaccgaccgtgattcattatcttgagaaccccccgtcgcgcgatgagctggtcaggctcattgccgatatggggatcacggtacgggcgctgctgcgtaagaacgttgaaccttatgaggtgctggggcttgcggaagataaatttaccgacgcgcagttaatcgactttatgctgcagcatcctgtcctgattaaccgtcccattgtggtgacgccgctgggaacgcgcctgtgtcggccgtcggaggttgtgctcgatatccttccggatgcgcaaaaaggcgcttttgccaaggaagatggcgagcaggtcgttgataacgcaggtaaacggctgaaataa

SEQ ID NO: 530 - DNA, 1002 bp, artificial
  Centroid sequence
atgattgataccaacctgcctttaactgacattcaccgccaccttgatggcaatatccgcgcacaaacgatcctggatcttggccgccagcataacatcgcgttacccgcctcgtcgctggacgccctgctgccgcatgttcaggtcaccagcagcgaaccggatctggtcagcttcctcagcaaactggactggggcgtgaaggtgctcgccacgctcgacgcctgccgtcgcgtcgcccgcgaaaacatcgaggatgccgcgcgcaacggcctgcactacgtcgaactgcgcttttcaccgggctatatggcgatgacgcaccacctgccggtcgcgggcgtggttgaagccgtcattgccggggttcgtgaaggctgccgtgaattcggcgttgaagcgcgtcttatcggcattatgagccgcaccttcggcgaagcggcatgcacccaggagctggaggcgctgctcgcgcaccgcgacagcatcaccgcgctggacctcgcgggtgacgagctcggtttccccggcggcctgttcctgaaccactttaaccgcgcgcgcgacgctggctggcatatcacggtccatgccggtgaagcggcgggtccggaaagcatctggcaggccatccgcgagctcggcgccgaacgcatcggccacggcgtgaaagcggttgaagatcgcgcgctgatggacttcctggccgaacagcgtatcggtatcgagtcctgcctgacctccaacattcagaccagcaccgtcgcctcactggcgcagcatccgctgaagaccttccttgagcacggcgtgctggctagcatcaacaccgacgatccggccgttcagggcatcgatattattcacgagtacaccgttgcggcccctgccgcagggctttcccgcgagcagatccgccaggcgcagatcaatggtctggagattgccttcctgacgccgcaggagaagcaggtgctgattgcccgggtccagcaagggtaa

SEQ ID NO: 531 - DNA, 1296 bp, artificial
  Centroid sequence
atgttgaatgacgtaatctggatcaagcatccgcaggggcaggatgcacaggccgatcgttcgctgacggagacggtcagcggcattattgcgcgggtaaaagatgaaggtgacgcggcgctaagggcctattcacagcagttcgataaggttgtgccagcccagttcgaagtgagcgagcaggagattgccgaagcacttgccggtatggacgcccagacgcgtcgcgacagtgaatttgccatcagtcaggtgcgtcgttttgcccaggcgcagctggcgaccatgcagccgctggaggtcgagaccctgccgggcgtgcacctggggcaccggatcatcccggtgcagacggtgggctgctacgtccctggaggacgctatccgatcctctccgcgccggtgatgtcgattgttccggcgacggtggcgggctgcgaacagatcattgcctgtctgccgccgggcgcgcatccggcgatgatcgcggtgtgccatctggcgggcgcgcatcgcatcttcaaagttggcggcgcgcaggcgattgcggctatggcctggggaacggacagtataccgtcggtggataaaatcgtggggccaggcaacgcctttgttaacgaggcgaaacgtcaggtgtttggcaaagtcggcattgatgccctcgccgggccgagcgagattttcaccatagcggacgacagcgccgacccgcgtattctggccgctgatatgctggcccaggcagagcatgacgtacatacccgcgtcgggctggcgacgaccagccgggagattgccgagcgtacgctggctgaggttgaacgccagttggccagcctgcccacggcggcaacggcaggcgaggcgtggcgtcgacagggcgagattgtactttgcgaagacgaagcgcaactcatcgcttttgctgaccatatggcgacggaacatctgcaggtgcatacccgcgatccgcacgccacggcggcgaagatccgcaactacggctcgctgtttattgggcagaacgccagcgtggtgttctccgataaatgctgcgggaccaaccacacgttgccaaccatggcggcggcgcgctataccggcggcttgtgggtgggggcgtatgtcaaaatctgcacccatcagtggattgatgagcagggcatcccggcaattgcggaaccggcgatccgccagagccgtactgaagggatgcaggggcaccggcgggcggcggagatccgattgcgtgcgcaggacatcgatgcaatcacctcaggcatgcgggactaa

SEQ ID NO: 532 - DNA, 534 bp, artificial
  Centroid sequence
atgtccggaaagcgtgtggttatggttgtcgatatgcagcaaggggtgttcgaaacgcctcgtcatcagcgtgaaaaatgtgtttcactgatcaatcagcttacgcaggcagccgatcgggtgatttttattcagcataccgagcccggcggtctggaagagggcagtgacgggtttgccttgctgcctgaactgcatcagcctgctgatgccctttacgtgaccaagacggcctgcgatgcattctataacacctcgcttgaaacgctgctccgcgagcaggggatccgggagtttgtcatctgcggttgcgctactgattactgtgtcgatgccacgttcaagaatggcgtcagccggggctaccacatcaccgtggcggaggatgcgcataccaccgcgaatcgcccggcggccgaagcccgcattctgattaaccactacaacgacgtctggcacaacttcattgcgcccgcaaacccgcccgcggtgaaacgcaccgaaacaattcttgaaaactggaaagcgaactaa

SEQ ID NO: 533 - DNA, 1183 bp, artificial
  Centroid sequence
atgacatcagacactccaccgattgccgcgcaaggcgtggccaccctgcccgacgaggcatgggcgcaagcccggcaccggacggaaatcatcgggccactggcagcgcttgaggtggtcgggcatgaagccgccgatgaggcagcccaagcgctgggcctgtcccggcgacaggtatatgtcctgatccgtcgcgcccggcagggtactggcctggtaacagacctgacgcccggccgatccggcggcggcaaaggcaaggggcgcttgccggaaccggtcgagcgcatcatccgcgagctgctgcaaaagcgcttcctgaccaagcagaaacgcagcctggcggcgttccaccgcgaagtcgcgcaggcgtgcaaaacccagaagctgccggtgccggcgcgcaacaccgtggcccagcggattgccggactacacccggcgaaaatagcccgcagccggggcgggcaggacgctgcccgtcccttgcaaggcgcgggtggcattccgccagaagtcaccatgccgctggaacaggtgcagatcgaccacaccgtcatcgacctgatcgtggtcgacgagcgcgaccggcaaccgattggccgcccatatttgaccctcgccatcgacgtgttcacgcgctgcgtactcggcatggtggtcacgctggaagcgccgtccgccgtctcggtcggcctatgcctcgcgcatgccgcctgcgacaagcggccctggctggaagggctgaatgtggaaatggactggccgatgagcggcaagcccaggctgctctatctggacaacgcggccgagttcaaaagcgaagcgctgcgccgtggctgcgaacagcatggcatccggctggactatcgcccaccaggccagccgcactacggcggcatcgtggaacggatcatcggcacggcgatgcagatgatccacgacgaattaccggggacgaccttctccaatcccggccagcgcggcgagtacgattccgagaagatggccaccctgacgctgcgcgagctggagcgctggctcgcgttggcggtaggcacctatcacggctccgtgcacaacggcctgctccagccgccggccgcgcgctgggccgaggccgtggagcgcgttggcgtcccggccgtcgttacccgccccaccgcgtttttggtcgatttcc

SEQ ID NO: 534 - DNA, 477 bp, artificial
  Centroid sequence
atgaacgtgataattcgcccggctcgtccggaagatgcaacggcaatttacgatatgatttatgagctggccgtgtatgaaaaagcgccggaggaagtggtcaccacgccggatgagatccgggaaacgctttttggcgcaggcagtaaaaccgaagcgctgatctgcgagatggacggtaaaaccgtcgggtatgccgttttcttcaccagctactccacatggcttggccgcaacggcatctatatggaagatctgtacatttcccctgagtatcgcggcaagggcgcggggagggcgatgctgaaaaatatcgcgcaatgcgcagtgaagcgccagtgcggccgtcttgagtggagtgtgctggactggaatcagcccgccattgatttttacctgagcatcggcgcgctaccgcaatctgaatgggttcgctatcgcctggatggtgaagccctgctgaaatttgccgaataa

SEQ ID NO: 535 - DNA, 1614 bp, artificial
  Centroid sequence
atgaaaaaaatcctgctcgcgtttgcgttctgttttgccgccctgagcgccttctcatcgtatgccgcagagcctcgccaggcgcctacggagcaggagcgcgcccgaaccgtctatatcttccatcagccgatcgtcatgctacaggcgaagtttggcctgactacgcccgaagagcgcgttttacgcatccgcaacaccctgcgcaattttaccgaggcggatgtacgtgagccgctcagcgtcgtccccgtcacccgctataaccagcagggacggctgatagtgatgaacggtaagccggtgatgctgctgacggaaggggatttggatgaaggggacgatcttaccctcgatcaggccgcgcagcgcgtgctggcgcgcatggaagcgcagagaatggcgctgcgcgatcaatacgataccggctggctggcgctgtcgacggtaaaaacagccgctggtctgctggcgcttatgctgctctgctatggcgcctggcgatcctggcgctggttccggcgcgtctaccgtcggcgtattgtggagaatcgcagccgtgtaccgcaaagctggcggcggtacataggcgcaattgagattcggctttacggcatcctgatgttcctgctggggttgattggcttttacgtctggctgagctgggcattcagcctgtttccatggacccgggtgtggggcacgtcgctgggggactggacgcttcgcgtggtgcagcaaatcgccctggcaattgtctcggccttgccggggctgacgattgtgctgatcattttcctccttaccgcttttattctgaagcttctcaaggtggtgctcaatcaggtggaggctggtcgtctgcaactccccggcgtccatccggaaaccgtgggggcgacccgcaagctcatttccgttgccgtctggctatttgctctctctgccgcctggccgtttctccccggcgcaaactcgctggcgtttaaaggtattagcgtcttcttcggcctgatgttaacgctgggctcggcgggggtaatgaaccatgccatgagcggtctggtcctgatttactcccgcgccctgcgtaaaggcgatgtcattcgggtggcggataacgaaggtaaggtcagtgaaataggcatgctggcgaccaaaattattacccgggaaaattatgtcgttaccgtgcccaatgcggtggtggtgagcggtaagatcaccaacctgagcgcgctacagcccgatggcagcctcaatctgacggtcagcgtcacgatcggttatgacaccccatggcgtcaggtgcatgccatgctggagctggctgcgaaacgggcaaaaggaattgaccttaccgagccgccgctggtgcgccagttagggttaatggactggtatatcgcttacgaattgcaggttcgtctgctgcccgatcagtccctcgcggttgcccgcaatgaactgcacagccagatacaggacgtgtttaatgaatttaacgtgcagatcatgtccccgaattttgttatgcagccggagggcagcgtgatggttgccaaagagaactggtatcccgcgccagctaaaccccctcagggcgaaaactga

SEQ ID NO: 536 - DNA, 2496 bp, artificial
  Centroid sequence
atgctttcaattgaatttttctgcccactgcccaacggcctgcatgcgcgtccggcctgggcgttaaaagagcagtgcagcgcatggcgcagcgacatccgttttatcaacagacggcttaacactcacgcggatgccaaaagctcgctggcgctgatcagtaccggtacgctgtttaatgacagctgcgtgctggaaattaacggcagcgacgaggagcaggcccgacgcgtgctggaggcgtatctcaccggcgcgtttatcgacagcgacagtattccctccggcgacgcgccgcacgttgcgcatcccctgccccgttcgcttgtaaggcttgctccccaccttcagcacggcattacgctcgccagtggcatcggggctggcactctgcgaggctggcagagcgataacctcaaacgttattgtcagatccccgcctcgccggaagatattacccgcctggaacacagcctggcgacgctggctgaacagctcaaccaccgcctgcgcgggctggacggcgagagtaaaaccattctcagcgcgcatctttcgctgatccaggatgaggagtttggcggcaccatacgccgactgatcgccgaggagcggctaagccttgcggaggcgatcattcgtaacatggagctgatctgcgacaagctgtcgctctccgccagcgactacctgcgtgaacgcgtcagcgatattcgcgacatcagcgagcagcttcttaacattacctggccggagttacagcaaacctccgcattcaccctcagcgcccccaccattctggtggcggaagatctgacgcccagccagtttctcagcctcgacacgcagtacctgaaaggcatggtacttgaaaaaacaggccggacgtcgcacacgctgatcctggcacgcgcggcctccgtgcctgtgctgagtggtttaacggtcgcctcgctggcgccgttgatgggaaaagaggtcattctggacggcatctgtagcgtgctggtcgttgaacccaacgacgcggtgaatgattactacagcgtggcgcagcgccttgccgaccgacgccaccagcagcagatcaaagatgcgggtcttcctgcgctcacccgcgacaacgtgccggtagagattgccgccaacatcggcagcgcgctggaagcgcccggggcgtttacctgcggcgcgcagggtatcgggctgtttcgcactgaaatgctgtatatggacagagacaccgcgccggacgagcaggagcaattcgaagcctatcagcaggtgctgctctccgcgcagggcaagccggtcatctttcgcacaatggacatcggcggcgataagcatctctcttacctgaacattccccaggaagaaaaccccttcctcggctatcgtgccgttcgtatttatcccgaatttgccgatctcttccgcacccaactgcgcgcgatcttacgcgcaggcgccagcggcaatgcgctgttgatgatcccgatggtgcacagtctcgatcagattttatggatcaaacaggagctgcaaaacgttcgtgacgccctggcctcacaggggttacgtcacaccgcacacctgccgctggggatcatggttgaagtgccttcagtctgctttatcatcgatcacttctgcgaagaggtggatttcttcagtatcggctcgaacgatatgactcagtatctctacgctgtcgatcgcaacaacccgcgcgtttcggggctgtataaccccatcacaccgtcttttttacgaatggttcgccagatcgtcaccgcagcgcatcgtcacgggaaatgggtcggcatttgcggggaacttggcggagagcagcgctacctccctcttctgcttggtctgggcttagatgagttcagcatgagcgggccgcgcatccctgcggtaaaaacccagctgcgtcagctggacatggcaacctgccgggcgctggcggaaaaggcctgcgacagccgcagcgcagaggaaattgaagccctgctggcggatttcacaccggaagcgccgccgcgtcccttgctggccctggagactatcgtggtcaatgagccgctgacctcaaaagagcaggtgcttcagttcttatgcggaaatcttgcgattcatggcaggaccgaaaacccgctggagcttgaagaagatctctggcagcgcgaagagattgtcaccacagccgtcgggtttggcgtggcgatccctcacaccaaatcgcaatggatacgccactccagcatcagcattgcacgcctggacaaggcgattgactgggagtcggatttgggcgacgtcgagctggtgatcatgctgacgctcggcgctcaggaagggattaatcacgtgaaggtcttttcccagctggcgcggaagctggtcaataaaacgtttcgcgagtcgctgtttgcagcaatgacgccgcaaagtatcctggatctgctgaacgctgaaatcatgttctga

SEQ ID NO: 537 - DNA, 288 bp, artificial
  Centroid sequence
atgggcctggcacataccttcatggcagcccaggcgctggaagacgcggcgacggaagccggttatgaggtaaaaattgaaacccagggcgcggacgggatccagaatcgcctgaccccacaggatattgccgacgctgacattattatccacgccatcgcgatcaccccggaagacaatgagcgcttcgaaacgcgcgacgtgtatgagattacgcttcaggacgctattaaaaacgcggcaggcaccctgaaagagatcgaagagatgattgcagcagaacaataa

SEQ ID NO: 538 - DNA, 1251 bp, artificial
  Centroid sequence
atggctattaaaaaacgcagcgcggttcgcccggacagtcacgagggtgacacacttgccatcaaatccgcaccggttgccgccggtgcgtctttctggaaagagcttccacagcacattatgtcggggatatcccgcatggtgccaacgcttatcatgggcggggttatcctcgccatttcacagctcatcgcctacgtctggctggagatcccgcctgacaccggtattctcgacgcgcttaactctggcaaattcaccggtttcaatctctcggtattgaaatttgcctatctgaccgaatcgttcggcgggctgctgttcagcttcgccatcccgatgtttgccgcctttgtcgccaactctatcggcggaaagctggcctttccggccgggtttatcggtggccttgtcgccacgcagccgacgctggtgctgaactttgatgcggaaaaactgacctggcttgccaccaaacccgtgccctccacgtttattggcgcgctgattatcgccatagccgcaggctatctggtcaaatggctgaatagccgtattaacgtaccgcagtatctgctggcctttaaaagcacctttctgatcccaatcctctcggcgctgtttgtgatgctggcgatgtattacatcatcacgccgattggcggctggctgaatgcaggtatgcggaccgtactgctggcggcgggtcaggcgggctccatgatgtatgccatcgggatggcggcggccacggcgatcgatctcggcggccccattaacaaagcggcgggatttgttggcctggggctgacaaccgatcatgtcctgcccatcacctcccgcgccgtggcgattgttattccgcccattggtctggggctggccacgctgattgaccatcgtctgaccggcaaacgactgtttagtccgcagctttatccgcaaggcaaaacggccatgttcctcgcctttatgggcatcagtgaaggggccatcccgttcctgctggaaaatccgcttgcgacgctgccggcgtatatggcgggtgcgatcgcgggtgcgatgaccgccaccgcgctcggtgccgtgcagtggttccctgaatcggcgatctgggcgtggccgctggtcaccaatctgggggcgtacatgctcagtattgtggtcggggcggcgatcaccgcgctgttggtcgtgattattcgtaacagtctgcacaagcgcggaaaactcgctatcgacacgctgtaa

SEQ ID NO: 539 - DNA, 873 bp, artificial
  Centroid sequence
atgcgcgcagggggtgatatgcgcgcaaccctgttgcccgccgatcagcagttttttgccgatctgttgagcggcctggtgctcaacccacagcagctggggcgagtctggtttgctcaacgtggcgcgtctgacgctgtcggaagcgtgagccgcgactggccacggcttgatgtcgttcttcgcggggaatatggcaacagactggttaccgggcagcagaccctctgccagggggaaatgctgtttcttcccgcccaggccgccagcgtcccggtgtttgaacgaccggtcatgctgctgagcattctttttgcgccgtcgtggctggggctggtgtttcatgatacccgtcacgggcgatccgtgcctgcgcagcgacacgttgagcttcctcatcctgaacgaggcgaatgtgctgcgatgctgatggccctgacacacctgagcgcttccccgcaggatcaggccattattcaaccgctggtgctgagcctgctgcactggtgccggaaagtggtgtcgtcgctgcctgaaccgggactgtcgcgcggggatttcctctatcagagcatttgtaactgggtgcaggaaaactatgctgaatccctgtcgcgggacagcgtcgccgcgctatttaatatttcggctaaccatctgtcacgcctgttctcccaacaggggacgatgagttttgtggattacgttcgttgggtgcgtatggcgaaggcgagaaccatcctgcaaaaataccacctgccggtgggggaagtggcgaagcgctgcggctatgccgatagcgactattttagccgtctgttccggcgccagtttggcctgacgccgggggagtatcgcgcacgctttcagtga

SEQ ID NO: 540 - DNA, 612 bp, artificial
  Centroid sequence
atgatcgcattcaatcacgttgttccggtacttaatctgtcggtgttcaacgtcagacgggcaccggccttcgcgtttgagcagagcaagcgcgcgaccataggcgggcgctttatccgtgttgatgaatcgcgggatctgccacttcttcacgttgttgaggattttacccagaaaccggtatgcagctttgctgttacgacgggaggagagataaaaatcgacagtgcggccccggctgtcgacggcccggtacagatacgcccagcggccattgaccttcacgtaggtttcatccatgtgccacgggcaaagatcggaagggttacgccagtaccagcgcagccgtttttccatttcaggcgcataacgctgaacccagcggtaaatcgtggagtgatcgacattcactccgcgttcagccagcatctcctgcagctcacggtaactgatgccgtatttgcagtaccagcgtacggcccacagaatgatgtcacgctgaaaatgccggcctttgaatgggttcatgtgcagctccatcagcaaaaggggatgataagtttatcaccaccgactatttgcaacagtgccctcaaaaaatacgcccggtag

SEQ ID NO: 541 - DNA, 705 bp, artificial
  Centroid sequence
atgaacccattcaaaggccggcattttcagcgtgacatcattctgtgggccgtacgctggtactgcaaatacggcatcagttaccgtgagctgcaggagatgctggctgaacgcggagtgaatgtcgatcactccacgatttaccgctgggttcagcgttatgcgcctgaaatggaaaaacggctgcgctggtactggcgtaacccttccgatctttgcccgtggcacatggatgaaacctacgtgaaggtcaatggccgctgggcgtatctgtaccgggccgtcgacagccggggccgcactgtcgatttttatctctcctcccgtcgtaacagcaaagctgcataccggtttctgggtaaaatcctcaacaacgtgaagaagtggcagatcccgcgattcatcaacacggataaagcgcccgcctatggtcgcgcgcttgctctgctcaaacgcgaaggccggtgcccgtctgacgttgaacaccgacagattaagtaccggaacaacgtgattgaatgcgatcatggcaaactgaaacggataatcggcgccacgctgggatttaaatccatgaagacggcttacgccaccatcaaaggtattgaggtgatgcgtgcactacgcaaaggccaggcctcagcattttattatggtgatcccctgggcgaaatgcgcctggtaagcagagtttttgaaatgtaa

SEQ ID NO: 542 - DNA, 783 bp, artificial
  Centroid sequence
atggcaatgcaatcaatggatgatgctgcgcttagtgctgctacaggtcaagatggtattaatattggtattgctcttggtgctgacggtattactatcgataaactatacttacatgataatgatggtttagcaacagctacaggtattacaggtgcttcaggtactgctggtgcgatttcaattggtggtgttactcttaaacagacaggtactgatccacttttgaacttagcaattgatacaaatggtgcttcaggtacaaatggggctttcttaaacgttgctgcaacagtgggtgctgttgatgtgcatgttggctctattggtgtaggtacttctggtacagtaaatgaaacaaccgcaactcgtggtattaccgaaacgtcaccaacagaaattattactggtttagatctatctttaggtaaaattacagcaaacgtccagctaggtgctgcccctcaaggtgcaatgattaaagtaaactctagtttgcagggtggtttaaatatctctaatttaggtattaaagacgccgctggtggtggtactatcaaacttgataaaatcatggtacgtggtgctaacgcgactggtgatttagatgttaatgcaggtatttctgtaaaaacaactggacttgaagtgaaaaataatagtactcaagcaatgaatgtgtatttacaaggtgtgcatttaggtacagcagcatcaattggtgatgttgaggttcaaggcttaaatattgctaattcaacaattactatttctggccattaa

SEQ ID NO: 543 - DNA, 915 bp, artificial
  Centroid sequence
atgcaagatattaaattcataagtcaaggtattacctgtgcagcttggtatatacctgcaactacagacaaatttataaatgataatggacgaccatgtattgttatggcacatggttttggaggaacacgcgatacaggccttttagaatttgctaaaccatttagtgaagctggtattgatgcctttatcttcgattatcgtggattcggggattcaggaggaatacctcgccaagatgtatcttacctgcgccaacgtgaagattatcatgcagcaattgctgcagcacgaggtttacctaatgtagatgaaactcgtattgcaatttgggggacgtcttattctggaggccacgttttagtcgctgcggcccaagatcagaaaatatctgcagtaatctctatgaacccggctacagatggtttagctgccctctcacaaatctgccgttatggtggtctaaaacaattaaccgttgcagtcgctcatggactaaaagatttagcttattctcttttaggccaaaaagcgcatcttattccaatcgtggggcaaccgggcacggcggccatcattagtacacctggctcggaggtctcctataaagccatggctgggccaacatggcggaatgaagtatgtgcacgaactgctttagaggttgcaagaaaccggcccattaatttcgcccatcaaataaagtgtcctttattggtacaagtgggttcaaatgatcaagttactcctcctgaagctgctcgcaagtcggcaagcttagcaaatggagaagttaaattacttgaatatccgattgatcattttgatttttataatgaaccgtggcaaataaaaattttagaggaccaaattaattttttaactcaagccttggctcgtccccgtgttagataa

SEQ ID NO: 544 - DNA, 1443 bp, artificial
  Centroid sequence
atgaataaacacttattactaaacattgcttttttaggttcggtccagctttttacaatatctaatgcattggctgatgttcccttaactccagcgcaatttgcaaaagcaaaaactgaaaattttgaaaaaaaggttcttttatcaaatttaaataaacctcatgctttagtctggggaccggataaccagatttggttgactgaacttgtgacaggcaaaatcttacgagtaaatccagaaactggtgcagttaaaacagtatttcaagtacctggtattattaatgatccgcatgcacaaaacggcttattaggttttgcatttcatcctgattttaaaaataacccatatatttatatctctggaacttttaaaaatcctcaggcaacagacaagaactctccaaatcagacaattattagaagatacacctataataaatcaacagataccttgcaaaacccagttgatttattagcaggcttaccttcttctaaagaccatcaggctggtcgtttagtgattggaccggaccataagatttattacactttgggtgaccaaggccataaccagttaacgtatttgtttgagcctaactatgcccaaagtcttccaacccaacaagaattaaagaataaagacttccatgcctattctggtaaagtcctgcgtttaaatttggatggtagtattcctcgtgataacccaagttttaatggtgttacaagtcatgtttacaccttaggtcatcgtaacccacaaggtttggcatttgcaccaaatggtaagctcttacaagctgagcaaggcccaaattctgacgatgaaattaatttggttgttaagggtgggaactacggttggcctaatgtggcaggctataaagatgacagtggttatgcctatgcaaactattcagccgcaaccaataaatctcaaattaaagatttaggacaaaacggcataaaagtagcggcgggtgttccagtaacaaaagagtctgaatggactggtaaaaactttattgcacctttgaagaccttatttaccgttcaggatacttataactataacgacccgatgtgtggcgatatgacttatatctgctggccaacggtagctccatcttcggcttatgtttatacgggcggtaaaaaagcaattccaggttgggaaaatactttgcttgttccatctttaaaacgtggggttattttccgtattaagatggatcagacatatagcacgacctatgatgatgctattccaatgttcaagagtaacaatcgttatcgtgatgttattgcaaaccctgaagggaatactttatatgtcttaactgacccggaaggtaatgttcaaaaagatgatggttccgttacaaaccagttggaaaacccaggggctttaattaagtttacctataaagctaagtaa

SEQ ID NO: 545 - DNA, 2319 bp, artificial
  Centroid sequence
atggaaaaaatgaatgtaaacaataagattggggttaaatcacgtaatcacatacgttcaaaacaagtactttttaagatgacaccttgttgtcttgccatatcggctatttttgcacagcaggcttatgcagaaaccgtaactcaaacggctgaagtaagcgaaaatgcaacacaaaaaccagtaacccaattgcaaaagattgtagtaactgcgactcgtacaccaaaaaatattgcagagattgcaggtacagttcaatctattgatcagaaacaaattatccagcaagctacggcgggtcgtaaagttgctgatattcttgctcaacttgtaccatctcttgcatcaagtagtggaacaacaagtaattatggtcagacaatgcgtggacgaaacgtattagtcatgatcgacggtgtttcgcaaacaggttctcgcgatgtttctcgtcaattaaatagtattagtcctggtatgattgaacgcattgaagtaatttcgggtgcgactagtatttatgggtcaggtgctactggcggtattattaatattattactaaaagagcagatacatctaaaccacttagctttgaaacaaaagtaggcattacatcttcagatacattccgtagtgacggcttagcttatgaagtcggacaatctgtctcatttaataaaggcaatatggatggtttcttaggggctaattttacaagtagagggtctcaatttgatggaaatggcgatagaatttccttaagcccttggcaaggtagtacgatggacactgatactatcgatgtaaatgggcgtttaaatttcaatttaaatgatactcagacattgagctttggtgcccagtactataaagataagcaggatactgactacggaccggattactcttatttaccgacaacctctaagagtaatgatgctacaacgccaacttataaggcaattaaaggtttaaagcttagtaatccattatttaccgagcgttatgctgttaattcacagtatcaaaatcaagactttttgggccaaatactaaatgttgaagcatattatagaaatgaaaaatcacgtttcttcccatatggcctatcaaataaatccgtgacttctgtaaaccagtctcaatcagaaattgaagtagctggattacgttcaactatgcaaaccgatcttaatatcgccaatcgggatatgaaaataacctatggccttgattatgattgggaaaaagataagcaatttgttgatattttggcaactcaatatccttatttagtgtatacgccaacaggccaacgtaaaggttatggaccaaacactgaaattcaaaatattggagcatttgttcaaagcgattatgcagttacggataaattgaacttgcaagcaggtattcgttatcaatatattcaagcggatactgatgcttatattcctagccgagagacaacaatggttccggcaggatcaacacatgatgataagccgttatttaatttaggtgcagtttataaacttacagatgcacaacagctatatgctaatttctctcagggcttcagtttccccgacgtacaacgtatgttgcgcgacgtttctacttataccgtttcaacagcaaatctacagccaattacagtaaatagttatgaactaggttggcgtttgaatcaggatgatggcttaaatctgggattgactggtttttacaatacttcggataaaactgtccaattcaacaatcgtgcagcaaaggttgtagatacagatcaaagagtatacggggcggaagcaactattagttatccatttatggaaaattataaggtcggtggcactttaggatatacccgtggtcagtataaagacgtggcgaataaatggcatgaattaaactcatttacggttgctccagtgaaaggaaccctttttgctgaatgggataataatgaagggtatggtgttcgtgttcagatgcaagctattaaaggaacaaataaagcttataaagatgaccgtgaattagccgcatttgcaacaactcaagatgaagctttccaaaacgctgtaaagaatgatgcgaatagtgctgcgcaaatcaaaggttataccactatggatgtattagcacatttcccggcttggaaaggtcgtgtagattttggtgtttataatgtgtggaaccgtcagtatcgaacagtatttgctcagcaagcagccgtctctaatgctaatccgttgttagcaatccctgcagaaggccgtacttatggtttaagttatacttttaactattaa

SEQ ID NO: 546 - DNA, 927 bp, artificial
  Centroid sequence
atgaaaacagatttaaatgatctttattattttgtaaaagttgtacaacatggagggtttgcttctgctagtcgcgaaattgatattccaaagtccaagttaagccgccgcattttattattagaagaacggttaggggtaagattaatcaatagaaatactcgtcaatttgatgtaaccgagttaggacgagaatactatcatcaatgccaaaatatgattttaggtgcagaagctgcacagcaagtcattgaaagaaatcaggcagaaccttgtggggtaataagagtcagttgcccgcctgcatggttatatgaccacattgcagatatgatttcaaaatttatgaggttgtatccccaagttaatattcatcttgaagtaaccaataaaaatattgatctgttaaatgacggaatagatatcgcattaagaattagatttccgcccttggaagattccgatcaggtcatgaagatttttgcaaaaaatccgcaatgtatagtggggcattgtgagctggtccagcaacatggtatgcccgaaaccccattagatctatgtggttatccttcaattgggttaggtaactcggaacaaaaaagtatatggacactatacagccgagagaatggtaaaatcgaaaaagttatacatacaccacgtttgattgtgaacgacatgattggtgtacgagatgcggtattaagaggagttgggattgctcaattaccttttgccctgatttataaagaaattgagcgtggtgaattaattaatttaatgccaaattgggaattaaaaaatagcattatgcatgcagtttacccctcgcgaaaaggactattgccaagcgttcgagcactattagattttttatcggaggagttcgaaacacttattaatgaaagacccggttttgaataa

SEQ ID NO: 547 - DNA, 642 bp, artificial
  Centroid sequence
atgactagtgaaaacatccgtgacccaaaacaagatcatcttttaactccagaaaactctgcttttattgtcattgattatcaaccggttcaagtaaactccattgcttcgatggatcgtcaactgttgattaataatattgtaggcacggcaaaagctgccattgtttataatttgccaattatccattcaaccgtaaatgttaagactggtttaaataaaccaccgattccacaattgagtaaggttttgaaagattatcctacctatgaccgtacaagtattaactcttgggaagataccgaatttaaagaagccgtaaaagcaacaggccgtagaaaactcattatgacagcgctttggactgaagcttgcttaacatttcctgcactagacgccctagctgaaggatatgaagtatatgttgtggtagatgctgtaggtggtacttctgttgcagcgcatgaagctgctttacgccgtattgaacaagcaggcggcaaaatgatcagtgtcgctcagttattctgtgaactgcaacgtgattggaaacgttcagaaactgtacctcaatttatgaaattatttattgagactggtggtacagcgggtatccaattctcttacgacaaagctgaataa

SEQ ID NO: 548 - DNA, 1326 bp, artificial
  Centroid sequence
gtgttggtggtacccctagtcattaccacccagacaagttttgccgattggattaaagattctgtttctaaaaatgaatcaaaaattattcaaattcgccattatattcatgagcatccagaacttgggaacatggagttcaacacttcaaaattagtgcaaaatgagttgaagtcttatgggatcgaagttcgaaaaggttttgcaaaaactggtgttattggaatcttaaaaggcgatctgcctggtcccgttatggcattaagagcagacatggatgccttacccatcgaagaaaaaacaaatttgagttatgcaagcaaagtaaaagcacaatatcagggtgagttacaacctgttatgcatgcatgtggtcatgacgcacatacggctatgctattgggtgcagcaaaaatacttgcagaaaacaagaatagactcgcgggcactgttgtttttgttttccaaccttctgaagaaggagctgctgatttggctggttttagccaaggtgaccaaatcggctcaagaaagatgattacagacggcgctcttaaaaagccagaacctgaagtcatgtttggtatccatgtcgtttcaggtattccaagtggcagcattttctataaagatgaagctatgcttaatagtgctgatgaattccgcattaaactgactggacagcaagtgcatgcttctatgccatgggctggtcgagatccaattgtggcatctgctgccattattaataatattcaaacgatgatcagtcgccgttctgatcttactaaaggtatggccgtgataacggtaggacatatttccggcggaactgcggccaacattattccgaaagaagttgatatggaaggtactattcgtactaataacgaagatatccgtcaaaatattcttcaacaattgcctgaaatggtcactcatactgcacttgcaaacaatgtgaaagctgatattgaactctcgccttatgcacctgtaacttataacaataaaatgttaactcaattaattttgcctacattagaaaatacggttggtaaaaataatttgcatcgtatggagactaatgcaagtgcaagtgatgactttgcacactatggcaagcttatgccctcgctttatatttcactcggtgcgactcctaaaaatcaagatatgagtaaagcagctcctaaccatagtccagaatttattgtagatgatgcaaccttaaaaacaggtgttgagtctcatatacgttttgttatggattatcctgctatcgctagtcaggtacaaaaagcttggagaaatgataagaaataa

SEQ ID NO: 549 - DNA, 1146 bp, artificial
  Centroid sequence
atgcaaaagcatcttttacttccattatttttatctattgggctagtcatccaaggttgcagttccgaagaggctaaacaaccagaagtcccacccgcaaaagtcagtgtattaagtcttaagccacaatccgttaattttagcgagaatctccccgctcgtgttcaagctttccgtactgctgaaattcgtccacaagttggcggcattatcgaaaaagtattatttactcaaggtagtgaagttaaagctgggcaagccttatacaaaattaacgctgaaacttttcaggctgatgtgaacagcaacaaagcttctctcaataaagctgaagctgaagttgctcgtcttaaagttcaattagaacgttatgaacaacttttaccaagtaatgcgattagtaaacaggaagtcagtaatgctcaggctgaatatcgccaagctttagctgatgtcgcacaaatgaaagctttactggcacgacaaaaccttaatttgcaatacgcaacagtacgtgcgcccatctctggtcgtattgggcaatcatttgtgaccgaaggtgctttagtcagccaaggtgataccaatactttggcaaccatacaacagattgacaaagtgtatgttgatgtaaagcaatctattggtgaatacgagcgcttacaaaccgcattacaaaacggcgaattatctgccaatagtgataaaactgttcgtatttctaatagccatggtcagttctacaacgtcagcgcaaaaatgctgtttgaagatattaatgtagatccagaaacaggtgatgtcaccattcgtattgttgtgaacaaccctgaacgcaaactacttcctggaatgtatgtacgtgtcaatattgaccgagcatcggtaccgcaagcccttcttgtgccttctcaagcaatccagcgtaataacaacggtgacccacaggtttatgtcattaatgctaaaggtttggcagacatccgtccgatcgaacttggacagcaatatgagcagttctacttagtaaataaaggactcaaagtaggtgacaaagtcatcgttgagggaattgatcgaattcaaccaaatcaaaagcttgaaataagtaagtggaaagcacccattactcaaggagctcaatga

SEQ ID NO: 550 - DNA, 255 bp, artificial
  Centroid sequence
atgaaaaaaattgatgaacaggacctatctagaattattgaaatggcatgggaagatcgaaccccatttgaagcaattgagcgagagtatggcttacgtgaaagtgaagttattcgtttaatgagatataacttaaaatcgagcagttttaaactctggcgtaagcgtatggcagggcgtaaaaccaagcatcagcaattacgttcaccagaagttgaacgagcttactgttctcgtcagtataaatatgcttaa

SEQ ID NO: 551 - DNA, 774 bp, artificial
  Centroid sequence
atgaataagcattcgatttcttttaagaaacgaatagcaaatggcgagacgctctacggaatcttttgttccgtagcttctccgattaatgtcgagcaactggcacttgcgggctacgactttattattatcgacttggaacatactttatttagtacgtctcaagtcgagatcatgattttagccgctagaaccatgaatcttgatgtatttgtgagggtgccgttaaacgccaaccatttagttctacctctgctcgatgcaggggtaacaggcattgtttttccacgtattgaaaatgcggagcaggctcaacaggctgtgaacaattgccactatatgccgcttgggcaaagagggctcaactcgacaaggttaaatcgatacggcatggacgatttagcgagttttgttcaacaggctgcaaacgaaacggttgtcattgccatgattgaaagcttggaaggactagaacaacttgatgaaatattaaaagttgaaggtatcgatattattcttgaaggtgctgccgacctttctcaatcgatgggaatgccgtggcaaactagccatccaaaagtgaaagagaaagttcaagagatgtatttaaagactaaaaatagtcaaaagcatttctgtgctattccccgacaacctgaagatatcgcggcatggaaacaacaatctgttcagctttttgtactcggcgatgaccgcagcattatacgccgtgcccatcaaaaccatttaaatacctttaagagcatttcataa

SEQ ID NO: 552 - DNA, 1206 bp, artificial
  Centroid sequence
atgcgctcatctcgcctagatcatttcattattttgctctgtcaatttttttccacttttgggctcatggtacttattccgatcatgccgctttatatggaaaaactgacagcgcatatgagtgctcctactatctgggcaggtttagcactcgcggctccggctattggcagcttatttacagcaccgattgtgggacacctatccgacacattcggccataaaaaagccttgctactttctctggcaggtttctgtatttcaatactgctcatggcgagtgctcagcatttatacctgtttattttcgcgcgaattttactcggcttttgcggtctttccgtaattttaaatgcctatgtttcatatctttccaacgagcaacaacgtggtgccgcttttgggcaactacaaagtagtgttgcgctagcttgcctatgtggtcccgtgctcggcgggatatttatggatcaatggcgggttgaagtattactcaacgcaacagcatttgttgttgtgacactcattgtgattgcgtcatttgtattaactaatcccgttaaaactgaaaccacaaaaaccaaagagaaatccaagcttcccgctttctttgatagaacgattttttcatggttaagcgccggcattttggttcaagcgggtggctttggtttggtgtcttgcttcgttttatacattagcgaaataagccaaagcactcactcatcgttatctgccgcgagtttaacgggaaccattcatgcgctttcatggggagcagcctttattgctgcgacctattggggaaaaagaaatgatgataaaggagactcttttaataacttcgtttacgcatctttaatttgcggcatcacgatttttgcattgatctgggtttcgaatatctggctagttcttgtattacgactcatacaaggtttttgctttgcagcccttattccttcgatcttacacaccatttctctaaaagctggcgctcaaagccaaggaaaagtgattggtatttctaacagtgcctttgtcttagggcaacttattggcccaatcaccatcacgctcacctactcatttttcaatattaccgctgcattaatctgcacctcactattttttatcggtgcgggattagtggtgattttgaacaaattcttaatggatacaattttaaaagaggcacaagaatga

SEQ ID NO: 553 - DNA, 276 bp, artificial
  Centroid sequence
atgaccatcctaccctatgctctaggtattagctcaattgccattaccatctctatgctactttgcctcttcagattggtcataggcccatcaattgtagatcggcttttagcactcgatactctcttcttaaatgcaacttgcctcattgttgttttaggcatttattggatgacgacctctttatttgaaggagccctactggttgcaatgctaggtttcgtatctacagcagccttagcacgttacttcacaactggtcatgtaattgattaa

SEQ ID NO: 554 - DNA, 1005 bp, artificial
  Centroid sequence
atgatccatgaaaatattctcgactgcataggtaaaacgccactattacaattatcaaggctattcacgcatcaatcgatctcagtgattgcgaaaatggaattgttaaatccaggaggaagtattaaagaccgtccagcattatttatgctacaggaaggcctgaaatctggagtaattaataaagatagtcatattgttgaaagttcttcaggaaacttagccatcgcacttgcaatggcatgcaaaatatatggattaaaatttactgccgttattgacccgaaaattgcttcagcaaacttacaaatgttgaagctttacaaagccaatatcgaaatggtctctgaaaaagaccaaaacggcggttacttaaaaaccagaattgatactgtaaagcggctatgtcaacaactgccgaatgctgtctggattaatcaatatgcaaatccaaacaactggaaaagccactattttggtgaagcagaagaaatcctaaatcaaattgatcgcaagattgattacctcgtgatcggggcaagcacctccggcacgattatgggcgtgtcccgtcgccttaaagaaaaattcccagaattaaaagtgattgcagtcgatattgtcggctctgtcttgtttggtggtacatctggtccacgtgaaattcctggcatcggtgcaagtactgttccacctctgctctctcccgatgaaattgatgatgtcatttatgtggatgactatgaatcggcagtcggttgcagagaacttcttgaacatgaaggaatcttcgcaggtggctcaagcggctcatctatttcagccataaaaaaactcattccaaccattcccgaaggttcatgcgtcttaacgctgctgcctgatcgaggcgaccgttatttagatctcgtttatgcagatgaatggttcgaaatgatcaagaaacgtcacttcaatcgaaacttacgacgtcaagaaaaccttactttacaaaatgttgtttaa

SEQ ID NO: 555 - DNA, 1770 bp, artificial
  Centroid sequence
gtggttcttcaatgctgcacaagaacaaaacgttggcacggttctaccgcttttataagaataggaataactaaaatgttagatcggatttacacagcacaactacaaaaaacgatagatgccctctacatggagaattatggagattttaaagatcatctttcctataaaaagccttatctggcaattactctcaatgatgagttggaactctatttcagctgtttaaaagtagatggtgtaaatcctttctatgttacccaacccgaagttttgcttcataacctgttgagcaatacaacttctaaaatttctatttctgaagtttttaactatttaactcaagcaacttggtggccgtcaccacaccatcaaaaagcgattgattattggctagacaacttagttacggctgaaaaaattcctcaaattttacagtcagcactttcattttcttcacctttaatcaaaagcgagttgctatcgctggtcgctgatcgtccatttcatccgttcgctcactcaaaaggtgaacttgccccactcacaactcaaaaagaaattgaggtgtattggtgggcatttaagaaggatgacgtcatcaacaatatgaagtcgattcctcacaaagagcttctgttatcagaagttgaggaacgtctgattgctgacaaaatagctcagctttcagatgactacttagccctgcctctgttagagactcaacatcgctatttaaagtttgatgaaaataagtacggcggtattgacctaaaccatgtcaccacaattggtttaccgacttcttctttaagaacccttattcacaacgcaaacccgactctgcatttaaaactctcaaccaatgccaaaacattaggtgcaatccgctctatgccaggccgctatttaatgaatggtcatacggcttatgattttttaaatgacgtcattaatgaaactgcattaataaaaaatcgtctctttttaagtaacgaaacgcactggtgggtgctgggtaaacaagagccgattgtaaagaatttaggtgtaattggttgccaagtccgacattttcctgacttttgccaagataaaaatgtcacgccaatcactatgtcagctttaagctgtacctatgttgacccttgggaaactttaggcattaagggtgacaaatggacattactaaaagacttaagcgttcattttattcaaacattcttaacgctttgggcaaaaggaatcatgcctgaatgccacgggcaaaacactatggtgtgttatgaaaataacaagttgaaatgctttattttacgtgaccacgataccttaagaatatgtaccacagccattgaagaaaatggttttacacctccgatttataccattgataccagtacaccgaacaatcttatctttactaaaaatgaagacttatttaattacttcattacattagggcttcaaattaacctctatccaattgctctagctgccttgaaatatacggatcgtacagaaagcgatttttgggagatggttcaagacattattcaagattttgtagaaacccaagccatttcagaacaaacaaaatcgcaaattcaaacttatcttttcgacaataagacttggccattcaaacagctccttacgcctttacttgcgcaagaaagcgactcaacaggcatgccaagtaaaatcggaagtacgccgaacccttatcacagcttatctgtttctagctatgagaccatggatatctaa

SEQ ID NO: 556 - DNA, 1014 bp, artificial
  Centroid sequence
atgagcaatttggctacccttcgctacttaagtcaatcagatttattaaatcttggcgcaaatcatagtaattcatttattgaagcgattactgaaggtttaaccctgcatgcaaataaacagtttgttcaacctttaaaaccttatcttcgctggcaaggtgctgaccatattgccgaccgtattatcgcaatgccttgttatttaggcggcaacgacccgattgccggaatcaaatggattggttcaagacaacataaccctaaaaaattcaatattccgcgtgccagcgcactgattgttttaaatgactcagaaacaaattatccagttgcagtgatggaaggcagcttaattagtgccatgcgaactgcggcaattactggtgtttcaattaaatatctagcaaaaaaagacttttcagacattactgtaattggctgcggaccaattgctcaaatgcagattaagactgtacttgaacaatatgctcaagtgaaaaaaatccatttatttgatgtgaaccctgaagcagctgaaaaactcaaagcattgtttttatcagaatatccgaatctagaaattgaaattcatgatagtgctaagtctgcaattcaacaagctgatgtcctcattacctgcacagtctcagataaaccttacattccatttgagtggcttaaaaaaggctgctttgtttcaaatatttcaattatggatatcgagcctgaagtcttcttaaaagtcgacaaagtgattgtagatgactgggaccaatcaaaccgagaaaagaaagtcatcaatgtgttggttgaggatggcttattcagccgtgaaaaactacatgctgaacttggcgacatcattattggtcataaaaacggccgcgaacacgaagatgaaatcattttgctcaacccaatgggcatggcgattgatgacattgtctgcgctaaatggttcttcaatgccgcacaagaacaaaatgttggcacggttctaccgcttttataa

SEQ ID NO: 557 - DNA, 360 bp, artificial
  Centroid sequence
atgaaaatttctaaaactttacttagtgttattggatgtacttgcttcatgcttagctctgcagcgatggcgaaaactaactctggtgtatattcacctcaaaagggtgtcatttgtgataaatacatttgtgcggacaaaaaaggcgtctctaaaaaacttacagctaaatatttaggtccttataaagcgaataaagctttctctcaaggcgattttgatacttcagcatttacattctcaaatggtgtgttttgtgataccaaaacaaagctatgtcatgtcgatcgatactttcaaaatgggcatcgtagcaaaattgataaaaatatgactgataaattattcaaaaataaataa

SEQ ID NO: 558 - DNA, 507 bp, artificial
  Centroid sequence
atgaaaaaaatactgatcctatcctcgttatttaccagttttatatttacagctgtgacgactcacgctgccgaacccacaaataaaaccaataaaattgttcaaacaaaaactgagtcaatcgataaaataagtgctcaaaataaaaaaatagtagtcgacttttatgaaggtgtgtttttaaaacatcaagttaaagaatatgccgaccgttatattggtcatcaatatatccaacacaatcctaatgttcctgatgggaaggctcctttcgtgaatttctttactgagaaattccaaaaaaatccacaagcaaaaaatgaaattaagcgcgcaatcgctgaaggtaatctggtggttttacacgtccactctacggaaaatgacaaagatagaggcagagcaattgttgatattttccgtgtagaaaatggaaaaattgtagagcactgggatgttatacaaaacattcccgaacaaagtaaaaactctaatacaatgttttag

SEQ ID NO: 559 - DNA, 402 bp, artificial
  Centroid sequence
atggcgggtagccaacgcttaaagcgaatggcggattcagtacaacgtgagttgtctgaactgatccgtcaggagctcaaagatcctcgcttagggggtctggtgaccatctctgcagtgaaagtcagtgcagacatgggatatgctgaagtttatgtcactgtgatggggcgtgagctaggtgatgaacaaagtgaagcagcaaataaagaaactttagatgtcttaaataaagcgtctggtttcttgcgtcatgaactaagccgtcgcattaaaactcgtattacgccacgtttgcgttttcactacgataaaaccaatgcctatggcaactatatgtttggtttgattgaaaaggcagtgcaagatctgccagagcagtcatctgaagataagtcttaa

SEQ ID NO: 560 - DNA, 228 bp, artificial
  Centroid sequence
atgccatttataaatatacaaactatagaaggtttactcgataaagacagtaaggccgaactttttaaacggataacagacttatttgtagaaatagagggtaagggtaatcctgcttttcgagagcatgtttggataagaattgatgaatatccacctgaacagtggcaattaggtagcttaagtccaacaaaacaaatgattgagttaatgacttcagcaaaatga

SEQ ID NO: 561 - DNA, 297 bp, artificial
  Centroid sequence
atgagtgctgtttatttagtagtgggacttcgagcaaaaccagaaaagattgatcaggtcagaagtgatcttattgaagtggtagctccatcccgcaaagaaagcggctgtatcacttatgaattattccaagatcaaaatgatcctagtctatttatattttatgaacattgggctagtgaaaaagatcaggaacatcatcatacttttggaccacatatccaaaactttcaaaaagaaggcatgggtaacgttgaaaaaatagaattttttcatcggcttcaggcgttggcttag

SEQ ID NO: 562 - DNA, 618 bp, artificial
  Centroid sequence
atgaatcaaattgatacttctaaagcacttgttacagcatataaagaaatagcaacctctactattggtcatgtacttgatcagggatatattgcacaggtattccccttaagacctgaagataaggtggtggggattgtacgtacagttcggattgaatcgatcaatgcgagtggtttaagacaagtcttgatgagttgtcaaccaaatgaagttctcgttattgatgcaagatatgatctacaacgtgcttgctggggagagcaaaggagcgtagccgctatacactgtggtctggctggcgttgtggtcttaggagctattacagatcggcaggctttacttcaactcaaacttcctatatttgctcatacaaccagttgtttaaccactcgcaatgaaggggaaagtctcgttgaaatagatgccaagattcatattaatcataccatcgtacaaactggagatctgattataggggatgcagatggaatatttataataaaaatggatgtggcacagcaatatttaaaagaatttcaaatgcttgagcaaaatgaacaaaataagaaaaatgaattctttttaaaaaataacatagatgactattatttttaa

SEQ ID NO: 563 - DNA, 1002 bp, artificial
  Centroid sequence
atggctcaatcatttatttctaataaagaacaaggttttaccttgattgaacttatagtcgccttagctttaggcctaatattagtggctgctgcaacacagctatttattggagggcttttatcgagccgattgcaaaaggccaatgctgaaatccaggacagcggtatttttggtttggaatatatggcacgtgatatacggcttctaaattatggaaatgttgtaaatccacaattaacagatacaacgccttggggaggtattgtattaacaggttcaacagcaacaaatgccaacaatattaattttattccaaaagttgatacaaatacttatattccggaagcgttattaagccgtggtgcaggtgatacggtaagtacagtgaataaccactggaaaggtctttcaaatatacagaatagttcaaatgctgaagtacaaagcgatcaactgactattcaattcattgccccgactaatatgactaattgtgaaggtgtgaatgtgttagcgggggacctaatagttcaacggtattttttacgtgttgataataatggtagctctcaacaggattatgcacttgcatgtgatgcgaatacccctgcggttagtgctacagcgcaacctgatatcgttaatggattaggagatgcaggccaaattatactgcctcgtattgaccattttcatgtcttattaggtgcgaaaaacgcagctggtaattttgcttattacacaattcctcagtatcgggtggctgcacaagctgctcgagatgcgagtccagctgtggctgctccaagaattctgtcaatacaaatatcggtattagcccgttctacaaataatgctcaaaataaggcaatagaccctaatcagtcttttcttatgctagatcagaatgtgcatgctgccgataacagaactcgctttttgcgacgcgtatatagcgtgacaattgctttacgcaatgcaatgggggaaacaatatga

SEQ ID NO: 564 - DNA, 570 bp, artificial
  Centroid sequence
atgacacatctcaatgagttatatcttatcttaaacaaatatctaaaatggaacaagtcacatttaaagtgctttgcgctcatcatgcttgtgattattttaaagcaaacatgtaatctttcttctgcatctaaagccttgcccatcaagtgcttaccacaatcattttatcgacgtatgcagcgcttctttgcaggtcagtattttgattatcgtcaaatttctcagttgattttcaatatgttttcattcgaccaagtgcaactgactttagatagaaccaattggaaatggggaaaacgaaatattaatatcctgatgctcgcaatcgtttatcgtggaatagcgatacctatcctttggacattgcttaataaacgtggaaattcagatacgaaagagcgtattgctttgattcaacgctttatagccatttttggtaaagaccgtattgtgaatgtgttcgcagacagagagtttatcggtgagcagtggtttacatggttaattgaacaagacatcaacttctgcattcgtgttaaaaaaacttcattgtcaccaatcatttag

SEQ ID NO: 565 - DNA, 387 bp, artificial
  Centroid sequence
atgaaaattagccatcttgatcatcttgttttaaccgtctcaaatattgaaattacctgtaatttctatcaaaccgtattagggtttgaggtcatcacttttaaaggtgatagaaaggctctacagtttggaaatcaaaaaataaatttacaccagcaaggtaacgagtttgaacctaaggcattacagccaactcctggatctgccgacctgtgttttatttcagaaactcccatttccgaagtgattgcgcatcttaatcaattaaatattacaattgaggaaggccccattgaacgtacgggtgcggcgcaccctattctttcagtttatattcgcgatccagatcaaaatttgattgagatttcaaataacataaagttataa

SEQ ID NO: 566 - DNA, 447 bp, artificial
  Centroid sequence
ttggttggtcgggtgaaactatatataagtgcactacagttagaaaatggagagcttttactcgtcgtttctcctcagtttaatgccaatgctattcaggattatgcattacgctgggaaattgaaaccttattcagttgtctcaaaggacgcgggtttaatcttgaaaatacgcgcttgacagaccctagacgagtgaaaaaattgattgcggtgttagctataagcttctgttggtgttacttaacgggtgaatggcaacatgatcaaaaaaaagcgataaaaataaagaagcatggacgactctcaatgagtttatttcgctatggtttagactatgttcaaatggcgattcagcgtttaattggttttgggaaaaaagaagagtttaaggaaattttggcaattttaagaaggcagaaccctgataggataagggttctgtga

SEQ ID NO: 567 - DNA, 459 bp, artificial
  Centroid sequence
atgtatcactatgaagaatgcggtctgagcaatatttggctgcgcaatggatttacaattgaaaatgatgaagactatggtgaactcgtatctattgaatctgttcatgagcttcataatgccattgggttgttcttaattacgcaaaagcctgacttgaatggtgaggaaattcgttttttacgtaaagaactaaacttgtcacagaagaatcttgctgggcttttaggagtcagtgagactagtattagacattgggaagctgatcgcggtttaattggtaaacctactgagctattacttcgtgcattatataaagagcatgttcaaggtgatggcaaactaagaagtatgattgagtcattaaatcatcaggaacgaactttagtaccaagtgaaattagtttttcatatggaaataaccattcatggcatcaaaccaattgtgaaatagcttag

SEQ ID NO: 568 - DNA, 561 bp, artificial
  Centroid sequence
atgattattcaacaatataaaattgtcttcgcaggcagtatgggggctggtaaaacagaagcgatcaaatcgctatctgaaattccaattttagaaacagaagcatttaatactgatgtacaaagtcaccaaaaatcacaaacaactgttgggattgattacggcgaaattactttagatgatggtattaaaatcgggctatatggaacccctggacaaagccgttttgattttatctggtcagttatttgtaaaggtgcgattggtattattcttctgttagatcacaatagctctactccaattgctgaactagaaagttacttggaatcctttaaaaattataatgataatattgcgattggtattacgcatattgatgaaaataaagaatcttcactccaacagtatcgaaactggttagcagaaaacgaacttcaatatccattattttttattgatgcaagagaacaagagcaaattttaatgatggttgaatcattaattgcatcacttgaagttaaggtaggcgcaacatctcaagggaaagatcatgcttag

SEQ ID NO: 569 - DNA, 126 bp, artificial
  Centroid sequence
atgactattcctgattttattcctcaagtgggtctacgtttttcttttaaagatacaaattttgaagtgacctatgtacacaacaatgtagttcgtttttccgcagtggatggtggaaaaacgtaa

SEQ ID NO: 570 - DNA, 1260 bp, artificial
  Centroid sequence
atggtaaaacaatataaagggatatttcgacctaaagtcgctatcacaactttatgcgttgcgatagccagtatttctgtatcttatgcagacggtttttatacaattattgggccagatgggcggcctatgattgtaccgagtaaaagaattgatcagaaaaaacaacctatccctaaaatagaggaaagaaaaccacaaactcagcagaatccactaatagtagattctgtacaaaaaacatctaaagaaaaagaacaaattaaaaattcaccgaaaaaactggaacaacatgtccaagaaaaattaaatactgcaccgactgcaccgactgcaccgactgcaccgactgcaccgactgcaccgactgcaccgcaaaaaactcagaaaaatacaaaaactgtttcagtagtcagtgatgatttaaaaacatccccagaaaaaaataaaattattgagagcggaaatgccccttcagtatctaataatgaatggcaaaaaaagttagttctcgttcctccaccaataaagagtacatctcaagctgcaccatcctccgattcttcactcgataaatctaaatttacaactattgatggcgtagagtatgtaaataatgaatatcttgaagatcaagaatttaaccttgaaggtaaaaagcggttttaccttatgcctgatggtttggggcgcactgaatcagtagagcggaaaaagggtgtaagtcgatcaactttagatcagcttttcaatcgacaaactcaagaccaagactctactgttgttttagcaccaacgtatatgcgtttgtcttcacaagagctagaagcagcttttgaacaagataagtgctttattaaagattataaaaaatcaattaaaacgcttagcataaataaggaagtaaacttatggccacggaagccattgaaagaaaagtttgaatatgagttggtacagttaaatccttctgttcagcatttaaaagttatatcttttgcttctagtaatgagaagcctctatattattggccactcgttgtatttttggatgataaaggctgtattttggaaggagtgagcgggtttaaaagcaaatcttatccttcgactatgttacagcatgcatcgattcaaggagttttaaaagtaccgccttcagcacattatattatgatgacgcctttatcttctgccgtggatgttacagaaaaagagttaacaaatcagggacaaattcaaatttcggtattacgttaa

SEQ ID NO: 571 - DNA, 588 bp, artificial
  Centroid sequence
atgtctgttcgtgaacaaaagatggcggaaacccgcaagaaactgattgaagtagcacgtcgtgcatttgctgaatatggctatgcagatacttcaatggataaactcacggcagaagcagggttgacccggggggcgctgtaccatcattttggggataagcgtggtttatttgctgcagtcgtcgatcaaattgattcacaaatggcagaatatgctcagcagcatttagagcagcctgatgatctttgggaaggattgctacttgaagggcagacctatattcaaaatgctttaaatcctgagtttcagcgtattgtgttacgtgacggacctgcagtgctaggtgatccagcgcattggccaagtcaaaacagatgtctgcagtctacccgtgagtgcgttgaacagctattaacagcagaacaaattaaaattgtagacccagaagcggcagcagtgcttttaaatggggctgccatgaacgctgcattatgggtggcttctagtgaatatcctgaacaggtacttcctgaagcattaaatgcttttaaaatctttgcatcaggctttttaaaagatgcatag

SEQ ID NO: 572 - DNA, 1389 bp, artificial
  Centroid sequence
atgaatgaagcacttagggatgagctcatcaaattaccaaatattccatattggtatgaaagaactgatgaaagaccatcgttaaatactgagattgatgctgatgtagtcattatcggagctggttacacaggcttgtggactgcgtattacttacttaaaacgtcaccttctcttagagttgtgattctagagcgtgaatatgccggatttggagcatcaggtcgtaatggaggttgggcttctgccatatttccaatttcattatctaaagtagcaaaaaattcatctcatcaaagtgcgctatttttacagcaagtaatgaatgagacagtagatgaaattggtcaaattcttcaattggaaggtattgatgccaattattctaaagatggctttttatccatagctcgaacacaggctcaactacagcgtgcaaaatcttcagttaaggcttcgaaagattttggtctacctgatcaatggtattttcttgatgccaaagctacaaaatcaaagattaatgtagctaatgcattgggtgcaatttatacaccgcattgcgctgtaattcatccaggtaagcttgttagaggattggctaaaactgtagaaaaattaggagctaaaatttatgagaaaagtgctgtaacgaaaataaactcgggccaagttacgaccttaaatggaaaagttaaagcccctattattgtaaaggctacagaaagttattcatgtcaattagatggatacaaacgttcaattattcctttgtattcattagtgctagccacagaaccaattcctgtatctgtaagaaatgatcttaagctaaaccataggttagcttttaatgatatgaggcatttgcgtgtatatgcgcaaatgactgctgatgggagattgatttttggtgggcgcggtgctccttatcattatggttcaacaatttcacccgagtttgatctagttgataacgttcatgaaagtatccgtagcactattaatgattttttcccaacgttaagaagtttaaaaataactcatcgatggggtggagcacttggcgtcgcccgtgattggtcaccatctgtaggttttgatccgaatactggcattgcttggggtggtcattatgtaggtgatggtgtcgcgatgagtaacctttcgggacgaattctcaaaaatttaattctaaatattcaagaaccaattaataagctaccaatcgtaaatcatgcttctcctttatgggaacctgagcctttacgttggatgggaattaattttggtttatctgcaacggcgttcgcagataaagaagaaaacatgactaatcgtccttctactgttgcatctgcactagaagcattgactggcgctcattaa

SEQ ID NO: 573 - DNA, 216 bp, artificial
  Centroid sequence
atgtcaaactcaaatgttgttaaaggtactgtaaagtggttcaacgaaactaaaggttttggtttcattcaacaagaatcaggtccagacgtttttgctcattttagcgaaatcgcaagttcaggtttcaaaaccttaatggaaggccaaatggttgaattcagcgtagcccaaggtcaaaaaggaccgaatgctgtaaatattattgctatctaa

SEQ ID NO: 574 - DNA, 1344 bp, artificial
  Centroid sequence
atgagcctaaaaaaagttcatcgccactcttgggtatcattagtgatttgctggattatctgggtagttgttgcatacgaccgagagttgattttccgcgcagccaatatgatttgtaatgaatttaatttatctccaacgcaatggggatacaccattgctgcaattacactttctttggccgttcttagtattccggttgctgctttaagtgataaacatgcgtccggttggaagcgaggaatttttcagtggcccttagtaatcggatttacttttatttcgttgctttcaggcattacatctttaagttcaagtttctataagtttgtaaccttacgtattatggtttctttgggttgtggggtggcagagccagttggggtgagtaatactgcagaatggtggcctaaggaacatcgcggttttgccataggtgctcatcactcaggttatccggttggagcgttacttagcggtgttgcaatggccaccatcattacctattttggcccgcaaaattggcgctatgccttttttcttggaattatatttgctgtaccggcattaacattttgggcgatttattcgacccgtaaacgttattcagagtttcaccaatcttgtgtagataatcaattcacaccaccaacagattttgtgcacgatgaaggagaagaaaaaacaagtacgcatagtacatgggaacgtttaaaacaaactctaagttctcggggaattgtgtttaccgcagccagtactttaattacccatgtggtgtatattggttttttaactatctttcctgcatttttatacaatattgtcgggttagatctggcgaaatcggctggcttgagcgctgtatttacaattaccggcatgatggggcaaattatttggccgactttgtccgataagattggcagacgactcacattgattttatgtggttgttggatggcagtcagcattgcaagtttttgtttaacctcaggcgtggtttccgttattgcaatacaactgttttttggactatctgccaacgcaatttggcctattttctatgcgacagcatcagattatgcaccagccggagcaattggaactgcaaatagtttaattacagttgctcagtatgtaggtggggcagtcgcaccgattattatgggatatttgcttacgagctttggtggctggcatagtcatcaggggtatatctggtgttttctcttaatgtcatgttgcgcgtttattggcgtgattttgcaaattatattgggttatctcattaaaaaagaaaaatcagaacaagttgataatttaagtttgagtgcaaattaa

SEQ ID NO: 575 - DNA, 555 bp, artificial
  Centroid sequence
atgcatcactataagcaaaaagcccaagctggggtgggtttactcgaagttttggttgccttaattttacttgctattggagttttaggttatgttgccttgcagctaagagctatggatgcctcttcagaagcattaagtaaatctcaagccattctagtgatgaggggattagcagaaaatatccgtacaaatagtactcaagctagccagtatcctacatttgtgcgtagttatagcaactatacatctgatactcctgcacccacgtcatgttttaactctctatgtactgcctcccaacttgctcaatttgatgcctatcaagcagctagaaatgctaatcaactgggtatgagaattacgatgtcaaattgccctggcgttacaaatacaatggtgcaacaacgccagtgcctatttgtcttttggggtaaaactgcgccagtgattactacaaatggaacaaatactagtgtggatgtttcaagttgtatgagtaataacggtgtttacgtgaataattcaacttgcttaatgatggaggcatattaa

SEQ ID NO: 576 - DNA, 1404 bp, artificial
  Centroid sequence
atgcctattcatacggaacatgatccacgtctgaaatctacactcaaaacccgccacattagcatgttagctttaggtggtgtgattggtgctggcttatttgtcggttccagttcagtaatagctgcagcaggtccagcagccttcatctgctacgctattacaggaattatggtaggtttaattatgagaatgctaggagaaatggcggcagctcgcccttccactggctcatttgtagatttctctagattagctttcggcaatctcgcaggcttttcaactggatggctttattggtatttctgggtagttgtcgttggctttgaagctgtcgttggtggtcaaattattaatcagtggttaccagatattcctgtttgggttatctcacttggcctgctaatcttgatgacctccctcaacttattatcagtaagttcttttggtgaagcagaatattggtttgcgggcattaaagtagcagctattgttgtattcttggttatcgttggtgcatatgtatttaaagtatggccaaattcaacagcctctttttctaatttaactcagcatggcggtttcttgccccatggcacattagcgctattctctggtgtagtttcagtaattttctcaatgagtggagtagaagttgctactatcgctgctgctgaatccgataatccttcacaaaacattcgtcgtgccgtaaatactgtaatggcgcggatcttagtctttttcgttttatcgacactgttcattgttgttgcacaaccttggactaatataattccagggaaatcacctttcgtagcaacacttgaaaaaattggtattcctggtgctggtacaatgctgacagtagtaattcttgttgctgtattatctgtactgaacgcaggtttatacactgcatctcgtttactgcatgtattaagttcaaataatgaagctccaagttggttagctagaaaaaataagcgtggtgtaccagtttggggtgtactcacctctactttggtcgggtatggatgtgttgtaattgcggcattgtggccagacactgcattccaatttttacttgactcctctggtgctctattcttatttatctatttgatgatttgcttatcacagttaaagttacgtaaaaaatgggtacaggaaggaactctaacctttaagatgtggttgcacccttggttaccgttatttgtaactctctgcatcgtcgctgttttagttagtatggggatcaatccagctacacgacttagcttattacagtccttaattgcaatctttgttattgtaattgcatacggcgctatgaaaattgttagccctaataaggcatcacatgtcccacaagttaatcccttaagacatactaaataa

SEQ ID NO: 577 - DNA, 1497 bp, artificial
  Centroid sequence
atgagccagatcgttggacattttatcaatggcgaagtagttgtagatgaaagtaatactcaaccagtattcaacccatcaacaggtgagatcagtaaacaagtaagtttaggtggagctaaaacaattgatgaagcagtcgcttcagctaaagcagcgtttccatcttggagtaaaacacctccactaaaacgtgctcgcatcatgtttaaatttaaagagttattagaacaaaatactgctgaaatttgccgtttaattggtgaagagcatggaaaaattattcatgatgcagcaggcgagttacaacgtggtattgagaatgtcgaatatgcatgtggcgcacctgagttattgaaaggtgagcatagtcgtaatgtcggccctaatattgattcttggagtgagtttcatcccctaggtgtagtggctggtattacaccattcaactttcctgtaatggtgccgttatggatgttcccaatggcaattgtatgtggaaacacttttgtcctaaaaccttctgagcgggatcctagcgcgactttatatattgctcagttgttaaaagaagctggtttacctgatggtgtacttaacgtagtaaatggtggcaaagaagctgttgacgctattttggttaataaagacattcaggcagtaagttttgttggttctactccaattgctgaatatatctacagaactgctacagccaatggtaaacgttgtcaagcgcttggtggtgcgaaaaaccacgcaattgttctcccggatgcagatttagacaatgtagtgaattccttactaggagctgcttttggttcttctggtgagagatgtatggctctatctgtcgcagttgctgttggtgatgaaattgctgacagaatgattgcagctttaaaagaggcaatggcaaatttaaaagttggtattcattcagataaacaaaatgatttcggacctgtaattactgcagaacataaaactaaagttattggacatatcaaaagtgcagaacagcaaggagctactatttgtgtagatggctcaaatctcgtccatgcagattatgaaaatggtttttatgtcggggctacattgatcgatggtgttaccaaagacatgagtagttatcaggcagagattttcggtcctgtactgcaggttatgcgtgttaagacaatgcaggaagcaatggatctaatcaatgaacatgagtatgggaatggtacctgtatttatactagagatggggaagctgctcgttattttgcagataacatacaagttggtatggttggtattaatattccactgcctgtaccagtagcttatcaaagtttcggtggttggaagcgttcattatttggtgatttatttatgtatggtccagatggcgtacgtttcttcactcgccgtaagactatcactcagcgttggccaactgcacaaatccgagagggtgctcaattttcaatgcctaccttatag

SEQ ID NO: 578 - DNA, 531 bp, artificial
  Centroid sequence
atgaataagtctctcatttgtttatcagcaattgctatgggcttaatgtctatcaatgctgctaatgctgcaacagctaccggtacattaactgttaaagcaacaattacaaatagttgtgttctaaatacttctgccacaggtactactgataatgcagttttggattttggtactttaagttctcttgcgaataacgtcgatgcagataccacaacaacaggtggtacggctattaaagtattatgtaacaacactgtgccatggactttggcttttgatgctggcaaaaatgctcaaacgacacaacgccgtatgattggtggtgcaactagcaacgaatatattccttataatcttttttcagatgctaaccgtgcaacagcaattggtgttgctacaactgcatatagcggtactggtactggtgcggtacaaacagttaacgtctatggtcgtatccctgctggttcagctttgccaagtgcaggtagctatgttgacactgtaactgtaacagtgacttattaa

SEQ ID NO: 579 - DNA, 1308 bp, artificial
  Centroid sequence
atgaaaaagtatgattatgatatagcagtaattggcgctggatgtgcaggtgttgttgcagcacgggatttaagtaatgcaggtcataaggttgttttattagaggcacgtgaccgtattggtggccgaacctatacaggtgaagcatttggccgacaagttgaatttggtggtggttactcacactggactcaaccttatatttggagagaactacaacgctacggaattggcttaaatcctcctacagaagttgataaaacggtttggtttgcagacgggaaactacacacgggaactcaagctgaatatgctgctattgctgaaccattattaacagctttctttaatgacgctcgtcagtggtttcctcttccttatgatgtaaatgctatcgatacgagtgatattgaaaaacaaacattaagagatcgtcttgataccttaaatttatcaacttatgaacgtgacgttttagacggcctattatcaacacttgttcactcttgggatgagcaaggagtcgcacagctcttattctgggcagctacctattttggaaattggggtgcgttctttgaagtagcagggtcttggccaattgccggtggaacacaaaaactcgtaagagctatttataatgattcaggtgctgaattacgacttacaacttcagttgcagccattgatgatcaaggtgagcaggttgttattacgactcaatctggtgaaaagattgtgacaaaaaaagccctcgttgctgttccattaaatgttttatctgacatcaaaattacaccagaggttaataaacctgctcgagatatgattgttgcaaaacatccaatgcgtactgctaaattatgggcacgtgtacgtggaaaaatcgagccatttattggatttgcgccagttgagcaaaacccaatcaataccgttcgagttgaatatgaacatgaagatgactcaattttagtctgttttatttctgacgagtcaactatagatgtgaacgatattgaagctgttcaaaaagctttacagatgtttaagcctgacattgaagtgcttgatatcgcatcacataactgggctaaagacccttatgcacaaggcacatgggtacactatcgccctgggcatttgtccgatgcagctccgctcatgcgtaaacctcatgggaatatctatttcgcaggaggagatattgcaacaatgagcatgggcggtatcgaaggtgctctagagtctggtattgaaactgctgcaagcatcacacatgcattagctcaaaaattagcagggtga

SEQ ID NO: 580 - DNA, 852 bp, artificial
  Centroid sequence
atgtttgaccctcgtcttcttcgtgcatttgtaaccatttttgaaagtggtagttttacagccgccgctgataagttgcatctgacacaatcaactattagtcagcagttagcacgcctcgaagaatcggttggtcactcccttattgatcgcacagcaagaccattacaattaacagcttcaggtgaatatttaattggttatgctcaaagaattttgacgcttcaacaagaggctgaggcggtcttaaaagatccagctggcagcaaccctattcgaattggattgccagaagatatgatgagtactgctatggcagaagttttcggtctattcgctcaagaacatcgtactattcggttagatgtcacttcaggcttaagccgcaacctgacagagcgctatcgtaatggtgaactagatattgttattgtgaaagaatcagcagccagcgccgattgttatgcctcttttcctgaagaaatggcatggtttgaaagtgaaaatgcgattacgcctttgtctgaaccaattcgtttagtgacctttcctcaaggtggactttaccgagatgaaatgtttgagacattagagcgtgaacgacgacgttggtatattgcttttacaggaagtagtttagaaagtgttctagtaagtgtcgaaacaggtttgggaatatctttactaccagttagtaccacaaaaggccgtcgtgtacgtagatataaatctttaggtgaagcttcacctatggttgtttcaatttatacatgggaaaaagctgggttgatttcccagcttgtcgatcacatgactaccgttttacatgatcgcttccaatcaggctcctag

SEQ ID NO: 581 - DNA, 303 bp, artificial; identical to SEQ ID NO: 507
  Centroid sequence

SEQ ID NO: 582 - DNA, 1248 bp, artificial
  Centroid sequence
atgagtcgccgtattatatttattggcgcagcaggtgaaatgtgtcgtttagcgatcgagcgttttgctaaagccaaaggtgattgggaacttgtactatgtgatattcgtcctgaattactttcaaatcttgttgaaaaactccctcaagggctagcaactacacaacatttagatttgtatgacaagcaaaagctacaagctgtggttaatggtgctgatttagttgtacttggagcaggtccatacattcgaacttcagcgcctgtcattgaagcatgtttagaagcaaaagttccttacttagattttgatgatgacgttgaaagtactgaacatgcgttatctttgcatgaaaaagcaaaagaagcaggtattccaatctatgtaggttgtggtgcctcaccaggtatggcaaatgtgttagtggtagatgccgcaaatgagctagataccgttgaaaatattgattgttgctggatggttggtgacgaacgcccaggtattggtcgtgccgtacttgaacatttcttacatatcacggcgggtgactgtcttacttgggaaaatggcaaacgtgttaatcacgaaacttttgtcgaaacaggcactgcaccgatgggaggtggattgggtgaaatattaatgtatgaaacagctcatccagaaccagttactttgccacgcaaatatccaactgctcaacgtatccgttgtttaggtggtttacaccctgccccatttaatggactagggcgtggagttggcttagctgttcatcatggtgaaatgacagtaaaagaaggtgtggacttccttgaagatctacttaataacaaattaggttcagctaaaggctggaaagctgcaatcagtggcatgatcggccaagttaaacgtaaagaatcctcattctctgccatggtcgagtttttgacaaaatctgctataggaaaaacctatccatataaaggcggtttattagctcgagtctacggaactaaaaatggtagaccagcagttgcaatcagaagaactgttaaatcaggtgaagattcctatttaatgcgcgatatggccgctattacagggacggcttgtgctgcattcatggtattagcgctcgatgaaacaggtaaacgtagcggaactttcgccccagaagactgggctgaaccagaagctttctacactgcccttgaacgtgtaggaacacctcgtgctgagattgtggagagtgtgctatga

SEQ ID NO: 583 - DNA, 1542 bp, artificial
  Centroid sequence
atgaacaaaaaaaatgctttaaaccaacctttggatacagaagtccttattattggtgctgggattgcaggtattagtgccgcgtaccatttaaagaaatatagaccaaactcaagctttaccatacttgaaggtcgtgacgatatcggggggacatggagtctgttccgttacccaggtatccgttcagattcagatatgcagtcttttgcatttggctttaaaccttggactcagaaaaagacctttggtagcgcgcaaatgatctgtgattatttgcatgagaccattacagaaaatggtattgatcaacatatccaatttggtagctatgtaaccagtgctgagttctcatcaagtgaaggtctttggaccgttaaagtcaaacaaaaggatcaaaagaatttagttaccttacgttcacgcttcctgctcatgggcacaggttattatgactataataatggttatacccctgagtttaagggaacagaagagttccaagggcaaatcatccaccctcaacattggccagagaacctcaactattcaggcaaaaaagtcgttgtaatcggtagtggtgcgacagcagtgaccctaattcctgctatggctaaagatgttgggcatatcacgatgttgcaacgatcacctagctatgtgatcgcgatgccaagtgtcgaccctattgcagttgcgctcaataaagtcctttctcctcaacgtgcgtatgaaattattcggaagaaaaatattgcacttagtcgtggaatgttcaatttaagtcgtcgttttcctgatgtgatgcgccgcttactcatcgcagatgtacgacgcagattgcctaaagattttgatgtcgcaacgcatttctcacctaaatacaatccatgggatgaacgcttatgcgttgtgccagatggagatatgtttaaagccatttcttcaggaaaagcatctgttgttactgatcatattgaacgctttaccaaagaaggcatattgctaaaatcaggaaaagtgttagaagcagatattattattaccgcgacaggtctaaatatgctggcattcagcaagattcaactcactgttgatggtaaagaaatcaattatccagataccactatttataaatccatgatgctgtctgatataccaaattttgcttttgcatttggttataccaatatcgcatggaccttaaaagtcgatctagtatggcagcacttctgccgtttgcttgactatatggatgaaaacaaatacggaacatttacccctgttattctaaataaagacatgaaacgtgttccttttgtggatttgagtcccggttatgttcaacgtggtttagcacagttcccaatggcgggaactgaaggaaattggacgcttcaacacgattacaagtttgatttggaacgactgaataaaggttctgtcgttgataaagcattacagttcactactattttgcccaagaaaaagctaactgtagttacagagccgtcgacggaagaactgaagatcaaagcttaa

SEQ ID NO: 584 - DNA, 933 bp, artificial
  Centroid sequence
atgacgaaacctgaagcgcagtatcaatcagggcaatttcaattttcctttctatcattaaaatattggggtatctggttcacagcttttattctaatgtttcttgcgtatttgccttgggcaatccagtggcgcttagcaaaactattttcaaaaattgcttggacactattgggttctagaaggaaaacgactttaagaaatttaggtgcatgttttcctgaaaaaacacctgagcaaattgaggccaaggctaagtcggtttttaccgatacgatgattggtatatttgaagccttaaatgcttggtattgtcctgcatggtttaaaaaaagggttcatatagaaggcttggaacatttaaatgacaatcgggatcggggcattctgctgttaggcacgcatagcacattactcgatgccggaggtgctgcatgtacgttattttttgatatggatgtggtgtatagacctcaaaataatccttttatggatttcctcattcatcgtagtcgcgctagggtttataaaaaccagattgcaaaagacaacatgcgtagcttaattgaaaaactcaaaaatggtcatgcaatctggtatagccctgatcaggactttggtttaaagcaaggtgttatggcttccttctttggaatacaagcagcaacagtcacggcacatcgaagactcatggatatttcaaacgctgttgcaataccattatatttttacagaagcggggatattcgagatcctcaatacaatgtactggtagaacctaaacttgaaaattttcctagcgaatgcgaagtgaatgatgctgaacgcgtcaatcaaattattgaaaaccagattcggatcgccccaacacaatacatgtggtttcatagaaggtttaaaactcgtcctgctggtgaagcgaagttttactga

SEQ ID NO: 585 - DNA, 621 bp, artificial
  Centroid sequence
atgacttcagccgtggcatcagatcatgaagaaatagaagatcagttgcataatccagcctttttacaagacttaagacagcaaatgataaagtttgcttttttacagttgtcttcgcttcctcaagctgaagatgtggtgcaagaagcattaacgagtgcttttcaacatttagattcatttaaagggcgggctgcattcaaaacgtggatattcgcgattttaaaaaataaaattattgatgtgattcggcaaaagtcacgtttggtcgcaatgacagaattatttaaagatgaggaaagtgaactgagtattgatgcactgtttgatgcttctggacattggcacaaatatgaagcgcctcaagcatggcaaagccctgaagaaatgatggagcaggcagatttctggataatttttgaagcttgtttaaatcatttacctgccaaatatgctcaagtttttatgatgagagaggtgatagagctgagttctaatgagatttgtagcaagttggaattgtctatctcaaactttaatgtgttgatgtatcggagtcgtaccagactacgtgaatgtttagaaaataaatggttattgaaggaggattgttcatgctga

SEQ ID NO: 586 - DNA, 816 bp, artificial; identical to SEQ ID NO: 63
  Centroid sequence

SEQ ID NO: 587 - DNA, 1911 bp, artificial
  Centroid sequence
atgaatgcacttcagcccgtttatcaagtaatggaccaaggaatcttacaggattttatcaatagccttctggttgaaacgattattcctgaacagtttatttttgattttgcgactgcccaaactgcgctaaatcaacatggcaaaaatcttcaagaagtatttaaaaatacgtctgaacaattttcttttgtgctattacacgaagagagtcggcaaggcttggtcatgtttgcggtacaaaaaggtattactcaagcctggaagtttgctaatgaaacagaagtttttctattggaacgcacaaatgatcatgttcagatcaatgtgattgggataatagaactttttgagtttattcaagcgataggtctttttaatcagtgtagcactgataaagttcaagccttttatgagcagctgcaaaaatgtttaaagcaatatcatttattacaacaacatcgggtaaatgcacatgatttgttgaatcaaagctcggcacatagattccgcattttagagcaatatgcaggttatcgggaccgcccatatcatcctttagccaaattaaaagaaggtctcagtcagcaagagtatatgcaatattgtccggaattcgctcaagaattatctattcattgggtggctgtacataaagataaaatgatgtttggtgaaggggtagaaaatattttcaaacaacagccaagcgaaatttttattcctcgtgctgagcgatatcaattaaaacaggaaatgtttcaacgtgggttaaatgaaacccacattgcaatgccaattcatccttggcaatttgagcatttatttcccaagttctatgcggatgatattgccgacggcgtttgtcatcctttgaattttatttctaaaggaatgtatgccagtgcgtctatgcgtagcctcttatcaaaaaatgttttagaagaaagtctaaaattaccgataggaattaaagctcttggttcattaagatttttgcctattgtgaaaatgattaatggtgaaaaaaatcagaaattattacagcaagccaaggcaaaagatgctgtcttaaaactaaaattatggctttgtgaagaaacacaatggtggtcatatttacccgagaagcaaaatgaccggacagcagacaatgagtggttatttgtagagaaacctacccatttggcagctcagcgccgtcatattccagctgaattattgcaagaaccttatcaacttataccaatggcaagtcttggacatacaattacgggtcagcctgccatttttgattatattttgcagcttcaacacaaggaaataaactccaagcagatacttatcgagtttgagaaactgtgtacatgtttctttgatgtaaatttgcgattattcagcttagggcttatgggtgaaattcatgggcaaaatatatgtcttgtgttgaaaaatggcgaatttgatggattgatgttccgtgatcatgattcattacgtatttatttaccttgggtagagcaaaacggattaaaagatcctaattatttgagtccacatgattttagaaatacgctttatcatgaatcggtagaggctctgttattttatattcaaactttaggtattcaggttaatctagggtgtattgttgataatttagcgagtcattatcaaattgaagttaagaatctatggtctgtacttgctcatgcgttacagcaagttattcaaaatctaaatttccagccagagattttgactcagctccaacatttactatttgaagtgcctgaatggccatataagcagttacttcgacctttgctagaacaagatacacggattggtagtatgccatcgggaattgggaaaacccgaaacccactttggtatgccttaaattgttag

SEQ ID NO: 588 - DNA, 1182 bp, artificial
  Centroid sequence
atgaatcagtctggagcttcttttgctcgatccatgcttatcgttacagtcgccttggttggactcaatttaagaccttttatgacaagcattggtccattagtctccagtatccgagcaggcactgggttgagtctacaaggaatagctttactcactttattgccgatgatgttaatgggagtcattgcatttattggtccaatcgtacaaagcatagttggcgagcgcagagttgttttgggtgctttactgactatttgtattggatgtggccttagatttttatttcctacagctgagggtttaattatcagtgcggttgtgatcggtttaggcgtcgcgctgatacaagcagcttttccaggcattatcaaaagagagtttagtcaacatattggaccgatgatgggactttattccgctatgcttatggggggcggtgcattaggcgcatggttagcgcctgtggtctcaaatataatgggtttatggcctgtgggattggctttctttgctctaccagctgtattggcattaatctcaacatttatttttttaccctctatcgtaagtttgaatgtatctgcagcacctgtaaagacgttgcttaagaaacctagaacatggttattaatgctgtgttttgggcttgttaatggtggttattcttcggttgttgcttggttagcaccgtcttttcaagatcatggttggagtagtggacaaagtggaaaattgctcgctttacttgctttaagccaagcagcatcggcactgattttgcctattttagctagacaatataaagatcgccgtccatggctatggtttactctattcatgcaatttgctggtttttctggacttgcatttgtgcccgagtttgcatctattttatgggcaatttgtttaggggttggcttgggaggctgttttgctctaacacttattgttgcacttgaccattttgaagaacctagcaatgcaggagctttatctgcacttatgcaagggggtggttttttacttgcggctataccaccttggctagtcgcagcattacacgactttacagggacttataaagcgggatggatttttcatctatgtagtgtgatactggtgatagttttagtgataagactagcacctaaaagttatcgcaaaattcgcctataa

SEQ ID NO: 589 - DNA, 1842 bp, artificial
  Centroid sequence
atgggacaattacatccagttttatcaaatacacatgtgattcaaaatgctttacaggcttggcaacatccaaattcggatcaggcaaaatatgttgagcaacgtgttattaagcaattacttcaagctttaatttttgaagatattattcattcagaatatgatggaaaaaattttattatagaagtacaaaatagtcagcgccaaaccattcgttatgtcgctgcagggcaaagacaatatagttacaaactggtacgccttgcccgtaatcaggatgtatttcgtcaagatgaaaacggtcattatcagattgctactttaaatttagttattgatgaaattcttagaaccataaccgatgcagcaaaagttgaagattttatttttgaattaaaacgaacatttattcatgatttacagtctcaagcatgttttgatcactatgctttgccggcaattcaatatccatatgatattttagaatcatatttaatggatggtcatccatatcatccgtgttacaagtcacgtgtaggttttagtttacaagacaatgtacgctatggtgtggagttcgcccaaccaatcgccttggtctggttggctgtgcatcaggacattgttgcaaaaaaacattcagaagatatagagccagatttattttttaaggagcaattgaattcacaagaccaagagctattcctgcaacatctctcagatcgtgatttgaaggctgatgaatatatttggattccggttcatccttggcaatgggaaaaccatttaatttctatttttgctgaagaaattctaaatggcaaaattgtttatttagggcaaagtcaggatcgctatttagcccaacaatctctacgcactatgactaacttgcagcatccggaaaagccttatatcaaactgtcgatgagtctaactaatacatcaagctcacgtgttctggctaaacatacagtaatgaatgggccaattattacagactggttgcaacgcttaattaaacagagcaaaaccgcccaagagcttgattttgctgtattacgtgaagtgtatggtttaagcgtggattttactaaattgccaaaatcacatgctcaacaggcctatggtacaattggatgtctatggcgtgagagtgtgcatcaatatttacgtgaaggtgaagatgcaataccgttaaatggcgtgagtcatatccaaaaagatgggcaagcattaattgcaccatggttacagcaatatggtgttgaatcatggacacgtcaacttttgaaagttgtgattactcctttgattcatttactttttgcggagggaattgcaactgaatcacatggccaaaatattattcttgtacataaacaaggttggccaacgcgagttcttttaaaggacttccatgatggtgtgcgctatagtccagcacatttagcacaccctgaattggctcctgaactcgatcagttgccgcctgagcatgcaaaaaccaacagtatgtcatttattttgacagatgatttaaatggtattcgtgattttagctgtgcctgtctgttttttgtcgctttaaccgatattgcaatatttttaaatcaaaactttgatcttccagaaaaaaatttctggcaatgggctgcggaagtcatccaaaattaccagcagcaacatccagagcatgcttcacgttaccaattatttgatgtttttgccgaaaaattgcgcattgagtcattaactaaacggcgtttatttggcgatcgtagcatacaaattaaatttgtcgataacccgttagctccttttaaattgcaggtgaagtga

SEQ ID NO: 590 - DNA, 861 bp, artificial; identical to SEQ ID NO: 338
  Centroid sequence

SEQ ID NO: 591 - DNA, 1308 bp, artificial; identical to SEQ ID NO: 377
  Centroid sequence

SEQ ID NO: 592 - DNA, 594 bp, artificial; identical to SEQ ID NO: 391
  Centroid sequence

SEQ ID NO: 593 - DNA, 348 bp, artificial; identical to SEQ ID NO: 340
  Centroid sequence

SEQ ID NO: 594 - DNA, 816 bp, artificial; identical to SEQ ID NO: 63
  Centroid sequence

SEQ ID NO: 595 - DNA, 306 bp, artificial; identical to SEQ ID NO: 341
  Centroid sequence

SEQ ID NO: 596 - DNA, 846 bp, artificial; identical to SEQ ID NO: 72
  Centroid sequence

SEQ ID NO: 597 - DNA, 840 bp, artificial; identical to SEQ ID NO: 339
  Centroid sequence

SEQ ID NO: 598 - DNA, 804 bp, artificial; identical to SEQ ID NO: 82
  Centroid sequence

SEQ ID NO: 599 - DNA, 1014 bp, artificial; identical to SEQ ID NO: 353
  Centroid sequence

SEQ ID NO: 600 - DNA, 501 bp, artificial; identical to SEQ ID NO: 375
  Centroid sequence

SEQ ID NO: 601 - DNA, 717 bp, artificial; identical to SEQ ID NO: 409
  Centroid sequence

SEQ ID NO: 602 - DNA, 504 bp, artificial
  Centroid sequence
atgccgggcaaccgcccgcattatgggcgttggcctcaacacgattttccgccatttaaaaaactcaggccgcagtcggtaacctcgcgcatacagccgggcagtgacgtcatcgtctgcgcggaaatggacgaacagtggggatacgtcggggctaaatcgcgccagcgctggctgttttacgcgtatgacaggctccggaagacggttgttgcgcacgtattcggtgaacgcactatggcgacgctggggcgtcttatgagcctgctgtcaccctttgacgtggtgatatggatgacggatggctggccgctgtatgaatcccgcctgaagggaaagctgcacgtaatcagcaagcgatatacgcagcgaattgagcggcataacctgaatctgaggcagcacctggcacggctgggacggaagtcgctgtcgttctcaaaatcggtggagctgcatgacaaagtcatcgggcattatctgaacataaaacactatcaataa

SEQ ID NO: 603 - DNA, 789 bp, artificial; identical to SEQ ID NO: 65
  Centroid sequence

SEQ ID NO: 604 - DNA, 435 bp, artificial; identical to SEQ ID NO: 431
  Centroid sequence

SEQ ID NO: 605 - DNA, 435 bp, artificial
  Centroid sequence
atggaaaacaatttggagaacctgaccattggcgttttcgccaggacggccggggtcaatgtggagaccatccggttctatcagcgcaagggcttgctcccggaaccggacaagccttacggcagcattcgccgctatggcgagacggatgtaacgcgggtgcgcttcgtgaaatcagcccagcggttgggcttcagcctggatgagatcgccgagctgctgcggctggaggatggcacccattgcgaggaagccagcagcctggccgagcacaagctcaaggacgtgcgcgagaggatggctgacctggcgcgcatggaggccgtgctgtctgatttggtgtgcgcctgccatgcgcggaaggggaacgtttcctgcccgctgattgcgtcactgcaagggaagaaagaaccgcgcagtgcggacgcggtgtag

SEQ ID NO: 606 - DNA, 1305 bp, artificial; identical to SEQ ID NO: 410
  Centroid sequence

SEQ ID NO: 607 - DNA, 366 bp, artificial; identical to SEQ ID NO: 505
  Centroid sequence

SEQ ID NO: 608 - DNA, 237 bp, artificial; identical to SEQ ID NO: 411
  Centroid sequence

SEQ ID NO: 609 - DNA, 852 bp, artificial
  Centroid sequence
gtggtgaagcctaagaacaagcacagcctcagccacgtccggcacgacccggcgcactgtctggcccccggcctgttccgtgccctcaagcggggcgagcgcaagcgcagcaagctggacgtgacgtatgactacggcgacggcaagcggatcgagttcagcggcccggagccgctgggcgctgatgatctgcgcatcctgcaagggctggtggccatggctgggcctaatggcctagtgcttggcccggaacccaagaccgaaggcggacggcagctccggctgttcctggaacccaagtgggaggccgtcaccgctgatgccatggtggtcaaaggtagctatcgggcgctggcaaaggaaatcggggcagaggtcgatagtggtggggcgctcaagcacatacaggactgcatcgagcgcctttggaaggtatccatcatcgcccagaatggccgcaagcggcaggggtttcggctgctgtcggagtacgccagcgacgaggcggacgggcgcctgtacgtggccctgaaccccttgatcgcgcaggccgtcatgggtggcggccagcatgtgcgcatcagcatggacgaggtgcgggcgctggacagcgaaaccgcccgcctgctgcaccagcggctgtgtggctggatcgaccccggcaaaaccggcaaggcttccatagataccttgtgcggctatgtctggccgtcagaggccagtggttcgaccatgcgcaagcgccgccagcgggtgcgcgaggcgttgccggagctggtcgcgctgggctggacggtaaccgagttcgcggcgggcaagtacgacatcacccggcccaaggcggcaggctga

SEQ ID NO: 610 - DNA, 627 bp, artificial; identical to SEQ ID NO: 62
  Centroid sequence

SEQ ID NO: 611 - DNA, 780 bp, artificial
  Centroid sequence
atgcagcacctgccggcaccgatacaccatgcccgggatgccgctcagcttcctgttgccatcgattatccggcagcgctggcactccgccagatgtcgatggttcatgatgaactgccaaaatacctgctggcccctgaagtgagcgccctgctccattacgtcccggatctgcgccgcaagatgctgctggccacactgtggaacaccggtgcacgcattaatgaagcactggcgctgacgcggggggatttttcgctcacgcctccgtatccgtttgtgcagctggccactctgaagcagcggaccgaaaaagccgccaggacggcaggaaggatgcccgccggtcagcagactcaccggctggttccgctctccgacgcctggtacgtcagccagctgcagacgatggtggccacactgaaaatccccatggaacggcgtaataaacgaacaggcaggacagagaaagcgcggatctgggaagtgacggacagaacggtcaggacctggattggggaggcggttgccgccgctgccgctgatggagtgacgttctctgtcccggtcacgccacatacgttccgccattcctatgcgatgcatatgctgtatgccggtataccgctgaaggtcctgcagagtctgatggggcataagtccatcagctcaacggaggtctacacgaaggtgtttgcactggatgtggctgcacggcaccgggtgcagttttcgatgcctgagtccgatgcggtgtctatgctcaaaagaattccataa

SEQ ID NO: 612 - DNA, 276 bp, artificial
  Centroid sequence
atgaagaaactgtttgcctcccttgccctcgccgccgctgttgccccggtgtgggccgctacccagaccgtcacgctagcggttcccggcatgacttgcgccgcctgcccgatcacagtcaagaaagcgctctccaaggtcgaaggcgtgagcaaggtcgatgtgggcttcgagaagcgcgaggccgtcgtcacttttgacgacaccaaggccagcgtacagaagctgaccaaggccaccgcagacgccggctatccgtccagcgtcaagcagtga

SEQ ID NO: 613 - DNA, 1695 bp, artificial; identical to SEQ ID NO: 412
  Centroid sequence

SEQ ID NO: 614 - DNA, 351 bp, artificial
  Centroid sequence
atgtctgaaccacaaaacgggcgcggtgcgctcttcgccggcgggctggccgccattcttgcatcgacctgctgcctggggccgctagtactggtcgccctgggcttctccggtgcttggatcggcaacctgacggtgctggaaccctatcgaccgttgttcatcggcgcggcgctagtggcgctgttcttcgcctggaagcggatttaccggcccgtgcaggcatgcaagccaggtgaggtctgcgcgattccgcaggtgcgcgccacctacaagctgattttctggatcgtggccgtgctggtcctggtcgcgcttggatttccctatgtcgttccatttttctattaa

SEQ ID NO: 615 - DNA, 1206 bp, artificial; identical to SEQ ID NO: 64
  Centroid sequence

SEQ ID NO: 616 - DNA, 840 bp, artificial
  Centroid sequence
atggctacccataagcctatcaatattctggaggcgttcgcagcagcgccgccaccgctggactacgttttgcccaacatggtggccggtacggtcggggcgctggtgtcgcccggtggtgccggtaaatccatgctggccctgcaactggccgcacagattgcaggcgggccggatctgctggaggtgggcgaactgcccaccggcccggtgatctacctgcccgccgaagacccgcccaccgccattcatcaccgcctgcacgcccttggggcgcacctcagcgccgaggaacggcaagccgtggctgacggcctgctgatccagccgctgatcggcagcctgcccaacatcatggccccggagtggttcgacggcctcaagcgcgccgccgagggccgccgcctgatggtgctggacacgctgcgccggttccacatcgaggaagaaaacgccagcggccccatggcccaggtcatcggtcgcatggaggccatcgccgccgataccgggtgctctatcgtgttcctgcaccatgccagcaagggcgcggccatgatgggcgcaggcgaccagcagcaggccagccggggcagctcggtactggtcgataacatccgctggcagtcctacctgtcgagcatgaccagcgccgaggccgaggaatggggtgtggacgacgaccagcgccggttcttcgtccgcttcggtgtgagcaaggccaactatggcgcaccgttcgctgatcggtggttcaggcggcatgacggcggggtgctcaagcccgccgtgctggagaggcagcgcaagagcaagggggtgccccgtggtgaagcctaa

SEQ ID NO: 617 - DNA, 783 bp, artificial
  Centroid sequence
atgagtcagccaccgttacctgctgtctgtacgcaggcagcgtccgccctgctgccggtggccattgattacccggcggccctcgcactgcgccagatggcaatgcagcatgacgactacccgaaatatctgctggcaccggaggtaagtgccctgctccactacgtccctgatctgcatcgcaggatgctgctggccactctatggaataccggcgcacggattaacgaggcgctggccctgacacggggagacttttcgctggcaccaccttatccgtttgtgcagctggccactctgaaacagcgggcggaaaaggcggccagaacggcaggacggatgccgtccggcagccagccccaccgcctggtgccgctttctgataaccagtatgtcagcgaactgcagatgatggtggccacgctgaaaatcccgctggagcgtcgtaacagacgtaccggcagaacggaaaaggcgcgcctctgggagatcaccgaccggacggtccgtacctggattggggaggcggttgaggccgcagcggctgacgacgtgacgttctcagtcccggtgacaccccatacattccgccactcctatgcgatgcacatgctgtacgccggcataccgctgaaggtgctgcaggcgctgatgggacacaaatcggtgagctcgacggaagtgtacacgaaagtgtttgcgcttgatgttgccgcacgacaccgggtgcagtttcagatgccgggtgctgatgcagtggctatgctcaaaggaggttcatag

SEQ ID NO: 618 - DNA, 2202 bp, artificial
  Centroid sequence
atgttcagccagatcgccaatattatgctttactgcctgtttatttttttctggatactcgttggtctggttttatgggtaaaaataagctggcagacgtttgtgaatggctgtatttactggtggtgtaccacgctggaaggcatgcgggatttaatcaagtctcagccggtatatgagattcagtattacggcaaaaccttccggatgaacgctgctcaggtactgcatgataaatatatgatctggtgcggtgagcagttatggtctgcattcgttctggccacagttgtggcactggttatttgcctgattaccttctttgttgtctcctggattctggggcgtcagggtaaacaacagagcgaaaatgaagtcacaggtggtcgtcaactgacagacaatccgaaagacgttgcccggatgctgaaaaaagacggcagggactccgatatccggattggcgatctgccgattatccgggattccgaaatccagaacttctgtctgcacggcacggtcggggccggtaagtcggaggttatccgtcgtctggccaactacgcccgtcagcgtggtgatatggtggtgatttatgaccgttcaggggaatttgttaaaagttactatgatccctccatcgataagatcctgaatccgctggatgcacgctgtgccgcctgggatttgtggaaggagtgcctgacacagccggattttgataataccgcaaatactctgatcccgatgggcacaaaagaggacccgttctggcagggttcaggacgtaccatttttgcggaagcggcgtatctgatgcgtaatgaccccaaccgcagctacagcaaactggtggacacactgctttccatcaaaattgaaaaactgcgtacctacctgcgtaattcaccggcggccaacctggtggaagagaaaattgagaaaacggcgatttccatccgtgctgtgctgaccaactatgtgaaagccatccgttacctgcaggggattgagcataacggtgagcccttcaccatccgtgactggatgcgtggtgtccgggaggatcagaaaaacggctggctgtttatctcgtcgaatgccgacactcatgcctccctgaagccggtgatctccatgtggctgtccattgccattcgtggtctgctggcaatgggagaaaaccgtaatcgtcgtgtgtggttcttctgtgatgagttacccacattacacaaactgccggacctggtggagatcctgccggaagcccgtaagttcggtggctgttatgtgtttggtatccagtcctatgcccagctggaagatatctacggtgagaaagcggctgccacgctgtttgacgtcatgaacacccgtgcctttttccgttctcccagccataagattgcggagttcgctgtcggtgaaattggtgagaaagagcacctgaaagccagcgaacagtattcctacggtgctgatccggtacgtgacggggtatcgaccggtaaggatatggagcgccagacgctggtcagttattccgacattcagtccctgccggatctgacctgctatgtcaccctgcccggaccgtatccggcagtcaaactctcactgaaatatcaggaacgtccgaaggtcgctccggagtttattccgcgtgacatcaacccggaaatggagaaccgtctgagtgccgtacttgccgcaagggaagcagaaggtcgtcagatggccagcctcttcgaaccggatgtcccggaggttgtttccggagaagacgtgactcaggctgaacagccgcaacagccgcaacagccgcaacagccgcaacagccgcaacagccgcaacagccgcaacagccgcaacagccgcaacagccgcaacagccgcaacagccgcaacagccgcaacagccggtgtctcctgtcatcaacgataagaagtcagattcaggtgtgaatgttccggcaggggggattgagcaggagctgaaaatgaaaccggaagaagagatggaacagcaactgccacccgggatcagtgaatccggtgaagtggtggatatggccgcttatgaggcatggcagcaggaaaatcatccggacacctggcagcagatgcagcgtcgtgaagaggtgaacatcaatgtgcaccgggaacgcggggaggatgttgagccgggagatgatttctga

SEQ ID NO: 619 - DNA, 399 bp, artificial
  Centroid sequence
atgctgaagtttatgctcgataccaacatctgcatttttacgataaagaacaaacccgccagcgtcagggagcgttttaacctgaaccaggggaaaatgtgtatcagttcggtcaccctgatggagctgatatatggtgcagaaaaaagccagatgcctgaacgtaatctcgctgtgatcgagggatttgtttcccgcattgatgttctggattacgacgctgctgcagccacacacaccggccagataagagcagaacttgcccgtcagggacgccctgtcgggccatttgatcaaatgatcgcaggtcatgcccgcagtcgggggctgattattgtgactaataacacccgggaatttgaacgtgtgggcggcctgagaactgaagactggagctga

SEQ ID NO: 620 - DNA, 720 bp, artificial
  Centroid sequence
atggcggtatcagctccagtcctcagttctcagtccacccacacgttcaaactcccgggtgttgttcgtgacaacaatcagtccccggctgcgtgcgtgaccggcaatcatctgatcgaatggcccgacagggcgtccctgacgggcaagctctgccctgatctgccccgtatgggtggcggccggcgtgtcataatccagaacatcaagtcgggaaacaaacccctctatcacagcgagatttctttcgggcatctggcttttttcggcgccgtaaatcagctccatcagggtgaccgagctgatacacattctcccctggttcaggttaaaacgctccctgacgctggcaggtttgttttttatcgtgaaaatgcagatgttagtatccagcataaacttcagcatcagaatgattcccgttcctgcacagagggttgttcccggttatccataaaatcggcgctgacgttgttcccgtcgaaccattcatcccacgattctccggccggcgtgataattcgggttcgcccgacagcgataacttccacacgttttacattttccggcaaagccactgcttttggcagtctgaccgcctggctgcggttactgagaaatacgctggtttccatcatgtgcctccttacagggatatgtcttacgtatatccattatggtttttgtgatgggatatgtcaaagggatatacatttatga

SEQ ID NO: 621 - DNA, 2163 bp, artificial
  Centroid sequence
atgagctttaatgcgaaggatatgacccagggcggtcagattgcgtccatgcgtattcgcatgttcagtcagatcgccaacattatattttactgcctgtttattttcttctggatactcgtcggcctagtgttatgggtgaaactcagctggcagacgtttgtgaatgggggtatctactggtggtgtaccacgcttgaaggaatgcgggatttaattaaatcccagcctgtctatgagatccggtattacggccagacgttccggatgaacgccgctcaggttctgcaggacaaatacacggtctggtgtggggagcaactgtggtcggcctttgttctggccgcctgtgtggcgctggttatctgcctgattacattttttatgaccacatggattctgggacgtcagggaaaacagcagagtgaggatgatgttaccggaggacgccaacttaccgacaatccgaaagacgttgccagaatgctgaaaaaagacggaaaagcgtccgatatcctgattggcgatttgccaatcattaaggattcagagattcagaactttttgctccacgggacagtcagtaccggtaagtctgaaatcattcgccggctggctaactatgcccgtcagcgcggcgacatggtggtgatgtacgatcgttcctgtgagtttgtcaaaagctactacgacccgtccatcgataaaattctcaacccctgtgacgcgcggtgtgccgcatgggatttatggcgggaatgcctcaccctgccggattttgataatgcggcgaataccctgatcccgatgggcacgaaggaagatccgttctggcagggttccggacggaccatttttgctgaagcggcatacctgatgcgtaatgacagcgaccgcagctacagtaagctggttgacacgctgctttcaatcaagattgaaaaactgcgaacctacctgcgtgattccccggcggccaacctggtggaagaaaaaatcgagaagacggccatttccatccgggctgtgctgaccaactacgtaaaagccgtccgctatcttcaggggatcgagcgtaacggtgaaccgttcaccatccgtgactggatgcgtggtgtacgtgaagatcagaagaatggctggctgtttatttcttcaaacgctgacacacattcttccctgaagccggtgatttccatgtggctgtccattgccatccggggcctgctggcgatgggagagaaccgtaaccgtcgggtgtggttcttctgtgatgagttgcccacgctgcacaagctgcccgacctcgtggaaattgtcccggaagcccgtaaattcgggggctgctatgtctttggtattcagtccagtacacagatggaggatatctatggcgagaaagcggcggcaaccctgctggatgtgatgaacacaagggcctttttccgctcacccagctataagattgccgactatgtcgcccatgagattggtgaaaaagagatcctgaaagccagtgagcagtattcctatggtgccgatcccgttcgtgacggggtgtcgaccggtaaagagatggagcgtgtcacactggtcagctactccgatattcagtcactgcccgacctgacctgttatgtcacgctgcccggaccctatccggcagtgaagctggccctgaaataccaggaacgtcccaaagtggcgccggagtttattccccgggaaatgaatccggaggcggaagcccgtctgagcgccgttctggctgcaagggaagccgaggtacgtcagatgtccagcctgtttgaaccggatacagaagcggttgcgccgacagcagcagaagcgcaggctgaacagccgcaacagccacagcccacggttgtcagcgataaaaaatcagcagcggcgggtaccgccgtgaatacgcctgcaggcggtgtcggacaggaactgaaaatgaagccggaagacgaagagcagccactgccccccgggattaatgcgtccggtgaggtggtggacatggcggcgtatgagcgctggcggcaggagcaggaggtgaatactcagcagcagatgcaacggcgggaggaggtgaatatcaacgttcaccgtgggcacggaaaggatgaaccggagccgggagatgatttctga

SEQ ID NO: 622 - DNA, 1209 bp, artificial; identical to SEQ ID NO: 68
  Centroid sequence

SEQ ID NO: 623 - DNA, 741 bp, artificial
  Centroid sequence
atgacgatggataacgccacacgtaacgattcgcgggcagtccgggtggatacccggctgcagcgactgctggcctggtcgccgggacagagagatctcatcaaaaccgtggcgctgctgctgatggtggctgaccatattaaccgtatcctgcacctgaaccaagagtggctgtttctggccgggcgcggggcgtttccgctgtttgccctggtgtgggggctgaacctgtcccggcatacgcatatccgccagtctgcgattaaccggctgtggggatgggcggttatcgcgcagtccggatattttctggcgggatttccgtggtatgaagggaatattctgtttgcctttgcggtgaccgcgcaggcgctgaagtggtgtgagcagcgctgcctgtttcactctgcggccgcgctgttactgctgacggcgtggatacccctgtccggaaccagctacggcgttgccggcgtgctggtgctggtcatctgttaccggctgtaccggatcacagatactgaagaacatctggcgcttgcggcctgcctggtggtggccgtccccgcgctgaatctggttaccagtgatgccgcggcggtggcaggacttctggtgaccgggctgacggtatggcttgtttcgctgacaggcaaatcacggccccggttctggccggctgattttttcccggtattctacacctgccatctggctgccctgggcgttctggcgatgtga

SEQ ID NO: 624 - DNA, 498 bp, artificial
  Centroid sequence
atgaaaaagattgtcgtggcggttttagttggtctggcgttaggtagcatcggcgtggctaacgcagcagggtataaaaataccgtttcaattggatatgcctacacagatttaagcggctggctttccggtaatgcgaacggtgccaacatcaaatataactgggaagatctggacagtggattcggggcgatgggttcagttacatacacctcggctgatgttaataactatgggtataaggtaggtgatgctgattatacctcccttcttgttggtccttcataccgttttaacgactatctgaatgcttacgtgatgattggtgcagcaaacggacatattaaggataactggggaaattctgacaataaaaccgcctttgcttatggggcaggtattcagcttaaccctgttgaaaatattgccgttaatgcgtcttatgagcatacaagtttttccactgatgctgacagtgacgtcaaagctggaacctag

SEQ ID NO: 625 - DNA, 705 bp, artificial
  Centroid sequence
atggcaacgacggacacactcaatatggcggcaccggcaatggtgcgaatctgcctttacggggatttacaacgatttggaaagcgcatcagcctcagcataaagacagcggcggaaggcatacatgcgctggcgatacaactccccggattccggcagcgaatgaatgagggctggtatcaggtccggattgccgggagcgatatggcgccggatacccttactgccagactgaacgaatcgttaccgccgggggcagtggttcatattgtaccgcgtatggcgggagcgaaaaacggtatctggcaggtggtagccggggcagcgctgattggcgcgtcatttattcccggtctgaatgctgtagcggcggcagtattgttttccgcaggaaccagtatggcgctgggtggtgtggcgcagatgctgacacctgtacccaaaacaccgacggtgggtcaggcagataacgggaaacagaacacgtacttttcttccctggaaaatatggtggcccaggggaacccggtgccggtgttgtacggtgaaatgaaaatcgggtcacgggtgatatcgcagatgatgagtacccgggatgagagcacgtcgggaaaagttgtggtgatcggctccccgttacaggcaaacaccacgtcgcggcaggacggcgggattaccagaccgtctgtcgtcatccggcagtga

SEQ ID NO: 626 - DNA, 534 bp, artificial
  Centroid sequence
atgaaatacacaatattgtcgctggtagctggtgcgctcatcagttgttcagcaatggcagagaataccctgactgtaaagatgaacgatgccctgtccagcggaacaggagaaaacataggtgaaatcacagtttcagagacaccttacggtctgcttttcactcctcacctaaatggtcttacgccaggaattcacggcttccatgtccacacaaacccaagttgtatgccgggaatgaaagacggtaaagaggttccggcgctcatggccggaggacatcttgaccccgaaaaaaccgggaaacatcttggcccatataatgacaaagggcatttgggggatctgcctggactggttgtcaatgcagatggtacagccacgtatccgttactggcaccacgccttaaatcactgtcagaactgaaaggtcactcattgatgatccataaaggcggtgacaattactccgataaacctgctccactgggtggtggcggtgcacgttttgcctgtggtgtcattgagaaataa

SEQ ID NO: 627 - DNA, 564 bp, artificial
  Centroid sequence
atgactgagcagaaacgaccggtactgacactgaaacggaaaacggatggggaagcgccggcccgcagccgcaaaaccattattaacgtcaccacgcccccgaagtggaaggtgaagaaacagcaactggctgacagggctgtccgggaagcgtcactggcagaaaaaaaagcccgggcaagaaaagatctgtccatctacctgcgatttcagtcagtggaggaagcggtcagcacgctgaaaccctggtggccggggctgtttgacggcgacacgccccgtcttttcgcctgtggcgtgcgtgaggcgctgtttgaggacgcctccaggcgtggtatcccgctgtcacacaaaaagataatccgtgcgctgaaagcgattgcccgttctgaagcatatctcagcgcgatgaaagccggggcctgccgatatgacacggaagggtatgtgacggagcatattaccgtggaggaagaacagtacgcgctggcgcgactggcaaaggtccgggcgcagaacgccagaaaagcggaactccgcgcggtgctggcgcagacggtctga

SEQ ID NO: 628 - DNA, 333 bp, artificial
  Centroid sequence
atgatgaaaacctttcactggaaagttgacccggacatgggggtggattcggaaccacaggtgtcggtggtgaggttcggtgatggctacgagcagcggcatgcatccgggatcaataatgacctgaaaaaatacagtgtgactatccgcgttgaccgggaggatggtccggcactggagggctttttgtcacagcataacggtgtgaaggcgtttttgtggactccgccttacggataccggcagattaaggttgtctgccggaaatggagtgtgaaagcgggattgctgaaaacaacattcaccgcgacatttgagcaggttatttcttag

SEQ ID NO: 629 - DNA, 738 bp, artificial
  Centroid sequence
atgattaacgatgacattctggcacatgcccgacagtgtgcgcctgcggaatcgtgcggttatgtggtcagaacggcacagggagagcggtattttccgtgtgaaaatctgtctgctgaacccacgatgtattttcgtatatccccggaggattacctgaatgcccggaaccgcggcgacatcgtggcgctggtacacagccatcctgacggtaagccctgtctcagcagtgcggatcgtaccctccagatacaaagcgggctggactggtggctggtctgtgataacaggatacataaattccgctgcgtgccacacctgaccgggcggcagtttgagcatggcgtgacggactgctacacgctgtttcgtgatgcctaccatctggccgggattgatatgccggatttcgatagggaagatgactggtggagtcagggtaaaagcctctatctggatcacctggaggcggcgggattttaccgggtgaatccggaggatgcgcagcccggcgacgtgctgatttgctgttttggttcaccgacgcccaatcatgcggcgatttactgcggcaacggtgaactgttgcaccatattccggagcagttgagtaaacgagaggggtataacgacaaatggcaacgacggacacactcaatatggcggcaccggcaatggtgcgaatctgcctttacggggatttacaacgatttggaaagcgcatcagcctcagcataa

SEQ ID NO: 630 - DNA, 306 bp, artificial
  Centroid sequence
atgcagtttaaggtttacacctgtaaaagggagagtcgctaccggctgtttgtggacgtgcagagcgacatcattgacacccccggacggcggatggctgtcccgctggtcagcgcccgtctgctgtcggaaaaggttccccgcgatctttacccggtgatgcatatcggggatgagccttaccgcctgctgaccacggatatgaccagtgtgccggccaccgtcatcggggaagaggtggccgatctcagcctccgggagaacgatatcaaaaacgccattaacctgatgttccgggggatctga

SEQ ID NO: 631 - DNA, 336 bp, artificial
  Centroid sequence
atgaaaatgaatgacaagactcctgaattctgggctgcggttttgaccggactcaaaaatgcgtggccccagatacttggggcgttaatggccggactcattgcctacggccgactgatatacgacggcgccacccgtaaaaataaatggcttgagggcgtcctgtgtggcgctctttccttatgtgtcaccagtgcgcttgatgtggtaggcctgccggtttccatttcgcctttcgttggcggaattattggctttgtcggtgtggacaagctgcgcgaaatcgcaattagcgcactcaaaaaacgtgcaggggttaatgatgagaatcagtga

SEQ ID NO: 632 - DNA, 2223 bp, artificial
  Centroid sequence
ttgcataatctggacatcttccttcctgaagccggatttctggcgctgttgttgagtctcggggtcaacgtgctgaccccgctggcgacgtggtgcgggatggggctgcactggcgcggcgtcatgcgcctgacgacctgcggcgcgtggacggcgttcacgctgctgctattggcgtttgcgattctggttagctgttttctgaccagcgatttttcggtcgtttatgttgcgcagcatagccatagccagttgtcatggggactgaaactggcggcggtatggggcggtcatgaaggctcgctcctgctgtgggcgctgcttctttcggggtggacggcgctattcgcctggcgctcccggcatgaatctgacgcgctttttccgctgaccctgagcgtcttgtccctcattatggcttcgctgctgctatttattgtgctgtggtccgatccgttcctgcgtattttccctcccgccatggaagggcgcgaccttaatcccatgctgcaacatctggggctgatcttacatccgccgctgctctatctgggttatggcggcctgatgaccgcggcgagcgtagcgctggcctcgctactgtgcggcggctttaacgcggcaaccgcctgggtgtgctggcgctgggcgttacccggttggtgcgctctgacgctggggatcattctcggatcgtggtgggcgtattgcgaactgggctggggcggctggtggttctgggacccggtggaaaatgcctcattgttgccgtggcttgccgccagcgcgttgctgcacagtttgtatgtcagccgccagcgcgggggcttccgtcactggtcgctgctgctggcgatactgacgctgatcctctcgttgctgggaacgctgattgtgcgttccggcattctgctttccgtccatgcttttgcattagataacgtgcgtgcggtgccgctatttaccctttttgccgcgttaagtctggcatcgcttgctctgtacggctggcgggcgcgggagccgtatccggcgacgcgtttgggcggtggaaagcgtgaaacgctcattctggcgacgctgctgctctttagcgccgtcttgttgatcgtgctggtcgggacgctctaccccatgatttatggtttgatgggctggggaaggctttcggtgggcgcgccctattttaatcgcgtcacgctgccgtttggcctgctgatgctggtggttatcgtgctggcgacaatcagaagccgcaaagtctctgtgcatcgtcagcttccggcgttgctggcgcatacgggcgtatttatcttcgccgccgggatcatggtttccagcggcagtcggcatgaaatcagccttaacctcagccccgggcagcaggtggatctggcgggctacattttccgttttgagcgtctggatctggaagccaaaggtaactacaccagtgaaaaagcgctgatcacgttgtggcaaaatgagcagcgtatcggtagcctgcagcccgaaaggcgcttctatgccgcgcgtcgtcaacagatgatggagccgggtatccgctggaatctgatgcatgactggtacgcggtgatgggagaaaaaaccggaccggaccgttacgccatgcgcttatacgtgcagaccggcgtgcgctggatctggggtgggggattgttgatggtgtgtggcgcgctgctgagcggatggcgggggaggaagcatcctgagttattgcctgatggcgctgcgcttatcaggcctacgagtgaaaagcatggtaggccggataaggcgtttacgccgccatccggcaagacgatgttacttgtggcttttctgatttttctgccttttagcacccacgcccaggtggtggatacctggcgctttgacaatccacaacagcaggaaaaagcgctatctattgccggtcaactgcgctgtccgcagtgtcagaaccagaatttgctggaatccaatgcgcccgtggcggtcagtatgcgccatcaggtttacagcatggtggccgaaggtaaaagcgaagcggaaatcaccgcctggatgaccgaccgttatggtgatttcgtacgctacaacccgccgttgaatgagcaaacgctgctgttgtgggcgctgccgtacctgctgttattgctggtgggcgtggtggcctggcgggtgagaaagcgtcagcacgcagaaaagggggaacaatga

SEQ ID NO: 633 - DNA, 192 bp, artificial
  Centroid sequence
atgttcgtagaactggtttatgacaagcgtaatgttgaaggactcgaaggggccagcgagatcattctggccgaactgacgaagcaggtgcaccagattttccctgatgccgaagtgagggtgaagccgatgcaggcaaactgcttgaatagtgataccaacaaaagcgatcgcgaaaatttgaacagatag

SEQ ID NO: 634 - DNA, 1173 bp, artificial
  Centroid sequence
atgttcgatttttcacaggaagttgaccgtcacggtacatggtgtacgcagtgggattatgtcgccgatcgttttggcgaggccgatctgctcccctttactatctcggatatggattttgccaccgcgccgtgtatcctggaggcgctaaaccaacgtctttctcacagcgtgttggggtatagtcgctggaaaaatgaggcgtttttaggggcgatttcccactggtttgcgacacgtcatcagaccacgattgatgctcactcccttgtgtacggaccttccgttatctatatggcatccgagcttatccgtcagtggtccgaccaaggcgacggggtggtagtccatacccccgcttacgatgctttttataaagcgattgagggcaatcatcgcatcgtcactcccgtcccgctggagaaagaaggcaacgcctggtattgcgatatggcaaaactggaggcggcgctggcacgtccggaaagtaaaatcctgctgctgtgcagtccgcaaaatcccaccggtaaagtgtggacgcatgacgagctggaaacgatgtcggcgctgtgcgagcgtcatggcgttcgggtgatttccgatgaaattcacatggatatggtatggggaagccagccgcatattccctggagcaatgtcgcgcgcggagactgggcgctggtctcctccggctcgaaaagtttcaacattccggcattaaccggcgcctatggagtgattgaaaatagcgaaagccgtgaacgctacctgtctgcgttaaaaggtcgcgatggtctttcctcgccagcggtgctctcgctcacggcgcacattgccgcgtatcagcatggcgcgccgtggctggatgcgttacgcgcctatctggcggaaaatatgcgctatatcgaacagaggctgaatgacgcctttccggcattgaactggcaggcgccgcaatcgacctatctggcctggattgatcttcgtcagctcggcattgacgatcaaaaattacaggacacgctcattcatcaggagaaagtcgctattatgcctggcgatacctatggcgcagaaggccggggatttgtgcgtctgaatgccggatgcccgcatctaaaacttgaaaaaggcgtctacggattgattaacgctatccgtaccgttcgctga

SEQ ID NO: 635 - DNA, 1593 bp, artificial
  Centroid sequence
atgacgacgaaaaccacgccaaaaataacgctatgggaatttttccagcaattgggcaaaacctttatgttgcccgtcgccttgctctcgttctgcggcattatgctcggtatcggcagctcgctcagtagccacgacgttattaccctgctccccatgttgggtaatccattactacaggctatcttcacctggatgagtaaagtaggttcttttgcctttagcttcctaccggtgatgttttgtatcgcgattcccctgggactggcgcgggaaaacaagggcgtcgccgcgtttgccgggttcgtcggctacgcggttatgaatctggcggtcaacttctggcttacggcaaaaggtattctaccgaccaccgatgcggcggtactgaaagccaataacgtacaaaatatactgggtatcccctcgatcgataccggtatcctcggcgccgttatcgcaggtattattgtctggatgctgcatgaacgtttccacaccattcgtttgcccgatgctctggcttttttcggcggtacgcgttttgtacctatcgtttccgccgtcgtgatgggtcttgtcggtctggttatcccgctcgtatggccaatttttgcgatgggaattagcgggctgggccatatcatcaacagcgctggcgactttggaccgatgatcttcggcaccggcgaacgcctgttgttgccttttggtctgcaccacatccttgtagcgctaattcgcttcaccgaggcgggcggtacgcaagaagtgtgcggtcataccgtgagcggcgcattgactattttccaggctcagctcagttgcccgacgacgcacggcttctctgaaagcgcgactcgcttcttatcacaaggcaaaatgccggcgtttctcggtggtttaccgggcgccgcgctggctatgtatcactgcgcccgtccagaaaatcgacctaaaattaaaggcttattgatttctggtttaatcgcctgcgttgtcggcggtacaacagaaccgctggaattcctgttcctgttcgtggcgccggtgctgtatgttattcatgccctgctgaccggactgggttttaccatcatggccattctcggcgtcactatcggcaatacggatggcaatattattgactttgtggtgttcggcatcctgcatggcctgtcaacaaaatggtatctggtgccggtagtggcggtaatttggtttgcggtttactacatcattttccgctttgccattacacgcttcaatctcaaaacaccggggcgtgaggcggagatcgctaccagtattgaaaaagcgattgctggcgcgccaggaaaatccggctacaacgtgcctgctattctggctgcgttaggcggcacggaaaacatcgtgagtttggacaactgcatcacccgtctgcgtctgtcagtgaaagatatggcgcttgtagatatccaggcattgaaggacaatcgcgcgataggcgtcgtacagctcaatcagcataatttgcaggtcgttatcggcccgcaggttcagtctgtaaaagatgaaatggttggtttgatgaataccgttcaggcataa

SEQ ID NO: 636 - DNA, 1029 bp, artificial
  Centroid sequence
atggctattgccaaaaaaatcactatccatgatgttgcgctggcggccggggtgtcggtaagcaccgtttccttagtgctgagcgggaagggccgaatatcggcggcgaccagcgagcgggtgaacgcggcaattgaacaactgggctttgtgcgtaaccgccaggcatccgcgttgcgcggcggacaaagtggtgttgtcggtttgatcgtccgtgatttatcggcgccgttttatgctgaattaaccgcaggattaacagaagcgctggaagcgcagggacgcatggtctttcttcttcatggtgggaaagatggtgaacagttaaatcaacgatttacgatgttgctcaatcagagcgtggatggtgtagtgattgccggtgcggctggctgcagcgaagcgctgagaacgcaggccgaaaaaaaaggtattccgctcgtgtttgcctcacgtgccagctatcttgatgatgcggataccgttcggcccgataatatgcaggcggcgcaactcctgacggaatatcttattcgtcagggtcatcagcgcatcgcctggctgggcgggcaaagcgcctccctgacccgggcggaacgcgtaggcggctactgtgcgacgttgctaaaatatggtttgccgtttcacagcgagtgggtactggaatgcgtctccagtcagaaacgggccgccgaaagtattaccgcgctgttgcgttataatccgaccattagcgccgtcgtctgctacaacgaaaccattgcgatgggggcatggtttgggttattgagagcagggcgacagagcggcgagagcggtgtcgatcgctatttcgaacaacaggtgtcgctggcggcatttgctgacgtcgcagaacaggcgctcgacgacttgccgattatctgggcctgcacgccggcgcgggaaattggctatactttggctgaacgcatgttacagcgtattgctcacgacgagcaccatttgcgaagtcaaacgatagccgcccggctggtgatgccaaaatag

SEQ ID NO: 637 - DNA, 1215 bp, artificial
  Centroid sequence
atgcatgagcttattaaatatcagtttaatacacgtcggaaaaaatatggtacaggagcggccttaagtttgcttaacggaaatgttgggcatgaggtgttagcatttcataaaaaattacccaattatgccgtcacgccgttacataatctggcgcatctaagccagcggcttggactagggtccatccatattaaagatgagtcctggcgttttggcctgaatgcttttaaaggtctgggcggctcttatgctgtaggaaaatatctcgctgataaattgcaatgtgatattaactcgttaagttttgctgcccttaatactcctgagattaaagaaaaaattaaagattgtgtttttgttaccgcgacggatggcaatcatggccgtggtgtggcgtgggcggcagagcaattaggtctaaaagccgtcgtttatatgcctaaaggatcatcgttaatccgggcagagaatattcgccatcatggagctgaatgcaccatcaccgatctgaactacgatgatgcagtgcgactggcccatagaatggcgcaaacaaaaggctgggtgcttttgcaggatacagcctggacagggtatgaagagatcccaacatggattatgcaaggctatatgacactagcggttgaagcttatgagcagctcgcagaaacaaacagtccgttgccaacccatcttattttacaagcgggggtgggatcgtttgctggcagtgttatgggttattttgttgaaaaaatgcaggaaaatatccctaatattattgtggttgagccgcatcaggccaactgtctttatcaatccgcagttatggatgatggtcaacctcactgcgtcactggcgatatggcgacgataatggccgggcttgcgtgtggggagccgaatattatcagttggcctattattcgggacaacaccagttgttttatttccgctgatgactgtctggcggctaagggtatgcgtatttctgccgcgccgcgtccaggtacggatacgccttttatttccggcgagtccggagctattggcgtagggttactttatgagttgatgaacaatatgcattatcaggatcttgctaatcgcttacagcttgatgccagtgctcatgttctgcttattagcaccgaaggcgatacgtccccagatatttatgaagatatagtctggaacggacgcagtgcttaa

SEQ ID NO: 638 - DNA, 1419 bp, artificial
  Centroid sequence
atgtctgctaaaacgctgtatgaaaaattagttgagtcacataccattcgtgaacttgataacgaaggacatgttttactttatattgatcgttcaatactgaatgaatataccagcccgcaggcatttagcgggttaagagaacgcggtcgcgccgttcggcaccccgacacgtttttattgaatattgaccatgttaatcccacgcggtcgcaacgggatgtcttaatgaccgatccgggaggacagctacaggttgattactttcgggaaaatgccgctgactttggcatcacattatttgatgtgctggatccgcgtcaggggattgaacacgtggttgctcatgaacaagggctagtgatgcctggcatggtgatcgccgccggggatagtcacacgacaacctacggtgcatttggcgcgctgggctttggtatcgggacgtcggaaattgaacatctgctggccacgcagacgctggtttaccgcaagctcaaaaccatgcgcgtaagtgttcagggagagctacctttcgcctgttccgcaaaagatattgttcttgaattgcttgaacgtattggcgctgatggcgcgacgggatatgccattgaatttgtgggtgaggccatcagcgcgttgagcgttgaaggacgaatgacgctctgcaacatggcggtagaagcgggggcgcgtggtgctattattgcgccggataaaaaggtttttgactatatctacggtaaaccgcaaatgcctgtaggtgaactctggcagcaggcattgctggaatggtcacagttgagcagcgatgctgatgcggtatttgataagacggtggcgatcaactgccatgatcttgagcctaaagtcacctggggaatcagtccggatcaaacaggttccatcaccggacgtgttcctttcccggaacaggaaaccaatccgcttaagcgcctggcgcttgagaaggcccttcattacatgggattaacggctggcatgttgctgaaagatattcgtatctctcacgcttttattggttcatgcacaaatggtcgcattgaggatttgcgtgccgttgcgaaggtgcttgaagggcgcaaaatcgccagccatgttcgcgggatcattgtgcctggttcaacaatggtaagacgccaggcggaagaagaaggactggcgaaaatctttattgctgccggttttgaatggcggcagtcgggttgctcaatgtgccttgcgatgaatgaagatgtattgtcgcccggcgatcgctgtgcatcaggtacgaatcgtaacttccctggacgacagggcgctggagcaagaacgcatttgatgagcccggcgatggttgcggcggcggtagcggggcatctggtcgatgttcggtcattacttcaggcaggggaataa

SEQ ID NO: 639 - DNA, 678 bp, artificial; identical to SEQ ID NO: 114
  Centroid sequence

1. A method of determining structural variations in a genome of a microorganism, particularly a bacterial microorganism, comprising at least a change in the genome comprising more than one base, comprising:
obtaining or providing a first data set of gene sequences of a plurality of clinical isolates of the microorganism,
wherein optionally at least a part of the gene sequences of the first data set are assembled; and/or
obtaining or providing a first data set of gene sequences of a plurality of clinical isolates of the microorganism and aligning the gene sequences of the first data set to at least one, preferably one, reference sequence;
analyzing the gene sequences of the first data set for structural variations of the genome comprising at least a change in the genome comprising more than one base to obtain a third data set of structural variants;
providing a second data set of antimicrobial drug, e.g. antibiotic, resistance and/or susceptibility of the plurality of clinical isolates of the microorganism;
correlating the third data set with the second data set and statistically analyzing the correlation; and
determining the structural variations in the genome of the microorganism associated with antimicrobial drug, e.g. antibiotic, resistance.

2. The method of claim 1, wherein the structural variations are detected alignment-free.

3. The method of claim 1, wherein the structural variations are detected alignment-free and wherein the structural variations are annotated to a pan-genome of the microorganism and/or annotated to one or more reference sequences.

4. A diagnostic method of determining an infection of a patient with a microorganism, particularly a bacterial microorganism, potentially resistant to antimicrobial drug treatment, comprising the steps of:
a) obtaining or providing a sample containing or suspected of containing the microorganism, particularly the bacterial microorganism, from the patient;
b) determining the presence of at least one structural variation in at least one genetic sequence of the microorganism, particularly bacterial microorganism, as determined by the method of claim 1, wherein the presence of said at least one structural variation is indicative of an infection with an antimicrobial drug resistant microorganism in said patient.

5. A method of selecting a treatment of a patient suffering from an infection with a potentially resistant microorganism, particularly a bacterial microorganism, comprising the steps of:
a) obtaining or providing a sample containing or suspected of containing the microorganism, particularly the bacterial microorganism, from the patient;
b) determining the presence of at least one structural variation in at least one genetic sequence of the microorganism, particularly bacterial microorganism, as determined by the method of claims 1, wherein the presence of said at least one structural variation is indicative of a resistance to one or more antimicrobial drugs;
c) identifying said at least one or more antimicrobial drugs; and
d) selecting one or more antimicrobial drugs different from the ones identified in step c) and being suitable for the treatment of the infection with the microorganism, particularly the bacterial microorganism.

6. (canceled)

7. (canceled)

8. The diagnostic method of claim 4, wherein the structural variations are detected alignment-free.

9. The diagnostic method of claim 4, wherein the structural variations are detected alignment-free and wherein the structural variations are annotated to a pan-genome of the microorganism and/or annotated to one or more reference sequences.

10. The method of claim 5, wherein the structural variations are detected alignment free.

11. The method of claim 5, wherein the structural variations are detected alignment free and wherein the structural variations are annotated to a pan-genome of the microorganism and/or annotated to one or more reference sequences.
